United States Patent Application Publication US 2026/0258423 A1 - sequence listing, part 12

SEQ ID NO: 167803 - DNA, 46709983 bp, Homo sapiens (residues 8,341,071-10,009,284 of 46,709,983)
  source 1..46709983: mol_type = genomic DNA
cttttattttattttccacagggtctgttttactcccatgttataaaatgcttttctcaagaaagcatagagcccattctcttctctagagagaatcgcagccttgcaaaagagacaactaaaaatacatacatataagtatcaagaatttaaaactcaaaatattaaatatgttacaaaagtatataagcaatagaataaataggatgaatagcaaaatggataaaatcaactgtgagttgaaagcctgaaagttcaggtgaaggtgttgaaaatgcttcagaaaaaactaaagagataaatatttataaaaataaagagctgggctcagtggctcacacttgaaatttcagctgctagggatgctgaggccagaggatcaattaaggccagaagtttgagacaagcctaagcaagaccttgtcactgaaaatgttttaaaaattattttgacattatagcatgtaactgtggtctcaactacttagaaggctgaggcaggaggattacttgaactcaggaagttgaggttacagtgaactataatcatgctaccgtactccagcctggagtgaggcaaaatctagtcacattaaaataaaataaaacaaaataaaataaaataaaataaaataaaataaaataaaatataatctagtcacgttaaaataaagtacaattatcaaggacaaaaataaaattgtacaacttggcaatagaaaaaaaatagagcatagagcaactgggggaaagggggttgaaagtataatttcctttttatttccttagttggtcattacttagactttttcacttaattaaaattttcttatactttggtgcccagttaaccccagagcatttttaattaattggtttagaggtagatactcatataagctttccactgcaaattacaagagccaaattttaaataaatgttggacctctaaattttctatttgcaatatttaaggaaataaaaattataaaaaacactttgtaaaacatttagtatgtaactgctgtttctaatgtataataaatccaattatggcagagactcactctgttgttgagaatctctccattatatgactgctgcttgtggtgcttaaacctcaggaagaaagaatatatgaatgtctgaacattgctttaaaaagacaatgtacatttaatgtagagatatgtgaccagcttagaaagctgcactttttccacagcaggcaaaccagagcctggataccccagggtcacagctcatgagaacatagggctggactgtgagaaaacaagaagcaattcgtgcagaggagttgacaagacaccaactgggctgagaaaaaagagctgatagattaatttccaaattatactacaaaacatacaataagcagaccccatagctttatacattaaaaccaaatgatgacaaagagtgaggattgcattaaattaaattaggagcaactaaagactggtttatgatcttgaaactttagtcactctccatagttccatcccatgacccggtaattatttcctgctttctgcatgccttggacactggtccatttctggccccaaagtgttcctttttctaataagagtacttacttcatctcttaatacaattcctttccttgcatactgtgccccaaagaagaaatattaaaaactttcctgatgtttttctgctgcggggttaatgggctcagagtgatgataagaacggccaatgagtgtgtggagccagatagtgcttaaaatatggacttcagtccagtgaagtctaacaagattggcacctgagcactcttctctgagacctgaggatggactcactgaacctggagctactaacgcagctgatacccacatatatacaccacctgtgttcctagaaactggccttcccagcccatcacagcaaacaccaacaccagcatggaacgcttgggagtcagaggtttttcttgtcgttgctactgccatcatccatgccataaccactgtccaggggctcaagaagctgcccacccaccttgctcactgctgacacctgagcaaatcacatgaaggccaaataattagtcttcctggacctgttaacactgctgccagcataactgccttgagacccaaaagcaggcatggtaagctcaccactgccaccactgggatccaatgactaaacctctggtgcccctattcccagcaaaactttaccacagcctctgctaaaaacgataccctaagccactgagaaaggtacagacaccactgatactctttacagccaaagaaatcatataaagacaggccgggtattgtggctcatgcctgtaattccagcactttgggaggccaaggccagtggctcgcttgaggctaagagtatgataccaacctggggaacatgtcaaaaccctgactctactaaaaacacacaaatttgctgggcatagtggtaggcacctgtaatcccagctacttgggagactgaggcacgagaatcgcctgaactcagaggtggagcctacagtgagccgagatagtgccactacactccatcctgggcaacagagcaaggttctatcttaaaatatatacacatacagagtttaaagtctgtgctctcctctcctcagctgccttgtgactgtgtaagtgtatgtttgggaagggagggataggatgaggacaggccagcagagagtcaccagcactggctaaaggtctcagaccaaattttatactcttgaccaggagaaacttctctgttattctaatcacattaaactcaagcattttctttttttctttcttttttttgagaaatcacatcgaacttccaaaattataaagttgaaaatatgtaataattgacaattggaaacaagaaagaggattagctataaaaataactcaggacaatgtatttatcatgaaaagatggtcttggtggaagaaagtttcatgcccagccagcccattcttcaatatctgctaaaaaaaaaaagagcaaagggaacttaaagacatcatagacttggaaatttcgtctcacagtgcattaaattcccaaatcacatgtggaagagaagaagctgctgcatattagactaactagttttactgaatgttgtctgttgatttaaaaattaatactcttatcaagagcaaattgaaatactgaaagttatttactaaacagcaaagaatattttcagtatataaaaagatttaaaaaaacgttgacaccttaactaaatctgacacaaatttaaaaggaaaagtaactagaaaatgaaagaagcgttgtacaagtatgcgatgcaccctctgttgcaccaactgctcctgtttgttgagtcccctcttctattctgcctcctccatctccttgctgattcccctttttgtctattttaatttctctctctattcctttctcaggtcaccatgtcacattccttttgtgtcttttgatgtccaatctcaccgacaccaccttcattctctattttatctttacaaatggttaattaggcataaagagggaaaacactcctgggaagatacctgaatcctggtgcacactatcattatcactgtttttcatgttgatgctcatgtgtctctgctttctcgacagactatttaatcagcagacagatcaacaggccaaaatttccaccatagttgcaaatttgaatgcggatgaatggattaaaacacattcaagtcttgcaatgaacggcataatgtatggtggtataattcagagtggttacaggggagagttaaagatcattgtatacaatatcactcgagaatcttttgctgtaaaactgcagatgtgggttcctcaatttttagtggtaccttgtcaacaattaacccctgaggatgtctctgccccaacagaggctacatacagaactgggagattcagacgcactggtacacgtagcttaaatcctggagccaaaatatgagtacagcgtccatcacatcctactcctatggctggtgaacttgtagctatgggagaagaaactgaaggcatagtacagtttcctaaagatgaaaaacaatattatgttcccctctgttttggttattacagagaataacctgtttactaatggtcagtacctgtgtctctgtgtctgatgccaagaataaattcatcatctgcatagccaccactgcaacagaagccaactgcagtcaatgttggctatgcgtggaattgccagaggccaccaaaaatgggctacgttggagaatcgtccctgtaccttactgcataccgaatgttgtgtgtatatccctgacaattctcacactacgactctccttgcacagccatggtgggtgtggttttcattaactgtgcttttaattctcctgtgcttacactgaatctgtaatctgtataaagtatgctttccccaagtatctgtaagggtattttcctacaattgagtatcaaattgaagccaaatttggaagaaaagttaaatactcaattttatctcaattgaacatggacacaaacaatggtcaccaagtcccggaacaggttctgtgagtttcttcaggcgttcatccaccagtgtctcagagaaatttctattttaatctgttcctgtatgttagttattgaaaaacaacagacaatcgccaaaaatttgacatttttgtggtttttgagcccagtagtgaagagtcctcgttacccggccttatgccaaagaactccttacaaaaagagctagggtcccagatggcactagagcttcctgagacctctccccatctctgcagggatgaggggccaactctgtagcccaggctgttgcttcccggtctgttgatgaatcctccatagtctggtgagtgtagtgtctgactctggagcccaggctattgcttctctgtctggtgatgcttcctccatactctgtagtctgctgtgtgtaaacatatgtatatatatatatatatacatatatatgtatataatttatacatataactgtaaataaaaataattatataattatgtacataattatttaaataaataaatgtaaataaatacatatataattatatatatataatatatatatttatatatataaaaaatatatatattttttcccttctcatatcaatttgcttatcatatcatttacttattatatctgtattgccatataattgagacaaaagatgtttacccttaaaagtattgtgtgtgccttttcttcttcctcatggatctcccatgcagaacacatgcctgacaaatttttatatttttagtggagactgggtttagccatgttggccaggctgatctcaaactcctgacctcaggtgatccttccatctcggcatcccaaagtgctgagattataggcatgaaacacccagccaggaggaggcatttctacaaagaaaacatacaaatggcaaacagacatataaatgttgctaaacatcattaaacctcagagaaatgcaaatcagaactacaataagacattatctcactccagttaaaatgtcttatatcccaaagacagacaataacaagtgctgacgaggatgtggagaaaactttagtgcactcttggtgggaatgtaaattagtataaccactataaaaaagtgtggaggttcctcaaaaagctaaaaattgagctgccacagctacaatgcaacccaacaatcccagtgatgggcattgacacaaaagaaagaaaatcggcttgttgctgcactgtttacaatagctaagatttgaaagcaaactgtctacaaatgaatgaatgtataaaaaaagtagtacatatatacattggagtagtattcagccataaaaatgagattttgtcttttacgacaacgtggataaaagagaagagtatgttaagtgaaataagccaggcacagaaagataaacactgtgcgttctcacttattcgtgggatggaagaattaatacaactgaattcacggacatagagagcagaaggatggttttcagaagctaagaaagacagtggaggctgggggaaaggtggggactgttaatgtgtacaaaaaaatagaataaataagacatattatttgatagcacaacgagatgactctggtcaataataatgtaattgtacattttaaactagctaagaaggaataatcagattttaacccaaagaataaatgcttgagtgggtgggtatcccattctctatgatgtgattattatgcattgcgagaccgcatcaaaacatctcatgaaccccataagtatatacacctacaatgcatcctcaaaaattacaaattaactgaagtaaataaaataaaactatttaaaaataaaatatcataacattaactagccccagaaatataagattttaatgaaataaaaatgcctctataataatcaaacagtgagaagaaagtcacactttactcctatttttgtttctgatctatcttctatctagtttcaagttgtagaattttcttttttcatttctaattaaattttattttattttatttttttattatactttaacttttacggtacatgcgcacaacatgcaggtttgttacatatgtatacatgtgccatgttggtgtgctgcacccagtaactcgccatttaacattaggtatatctccaaatgctatccgtcccccctcaccctaccccacaacaggccccggattgtgatgttccccttcttctgcccatatgttctctttggtcaattcccacctatgagcgagaacatgcggtgtttggtgttttgtgcttggatagtttgctcagaatgatggttccagcttcatccatgtccctataaaggacatgaactcttcattttttatggctgcattttgttccatggtgtatatgtgccacattttcttaatccagtctatcattgttggacatttgggttggttccaagtcttcgctattgtgaacagtgccgcaataaacatacttgtgcttgtgcctttatagcagcatgatttatactcccttgggtgtatacccagtaatgggatggctgggtcaaatagtatttctagttctagagccctgaggaatcgccacactgacttccacaatggttgaactagtttacagtcccaccaaccgtgtaaaagtgtttctatttctccacatcctctccagcacctgttgtttcctgattttttaatgatcgccattctaagtggtgtgagatggtatctcattgtggttttgatttgcatttctctgatggccagtgatgatgagcatttttccatgtgtctttttgctgcataaatgtcttcttttgagaagggtcttcatatccttcacccactttttgatggggttgtttttttcttgtaaatttgtttgagttcgttgtagattctggatattagcccttcgtcagatgagtagatggcacaaactttctcccattctgtaggttgcctgttcagtctgatggtagtttcttttgctgtgcagaagctccttagtttaattagatcccatttgtcaattttggcttttgttgccattgcttttggtgttctagacatgaagtccttccccatgcctatgtcctgaatggtattgcctaggttttcttctagggtttttacggttttaggtctaacatttaagtcttgaatccatcttgaattaatttttgtataaggtgcaaggaagggatccagtttcagctttctacatacggctagccagttttcccagcaccatttattaactagggaatcatttccccatttcttgtgtttgtcaggtttgtcaaagatcagatggttgtagatatgtggcattatttctcagggctctgttctgttccattggtctatatctctgttttggtacaagtacaatgctgttttggtcactgtagccttgtagtatagtttgatgtcaggtagcgtgatggctccagctttgttcttttggtttaggattgacttggcaatgagggctcttttttagttccttatgaactttaaagtagttttttccaattctgtgaagaaagtctttggtagcttgatggggatggcattgaatctataaattaccttgggcagtatggccattttcacgatattgattattcctacccatgagcatggaatgttcttccatttgtttgtatcctcttttatttcattgagcagtggtttgtagttctccttgaagaggtccttcacgtccttgtaagttgggttcctaggtattttattctctttgaagcaattgtgaatgggagttcactcacgatttggctctctgtttgtctgttattggtgtataagaatgctaatgatttttgcacactgattttgtatcctgagactttgctgaagttgcctatcagcttaaggagattttgggctgagatgatggggttttctagatatacaatcatgtcatctgcaaacagggacaatttgacttcctcttttcctaattgaataccctttatttccttctccttcctgattgccctggccagaatttccagcattatgttgaataggagtggtgagagagggcatccctgtcttgtgcctgttttcaaagggaatgcttccagcttttgcccatttagtatgatattggctatggctttgtcagagatagctcctattactttgagatacgtctcatcaattcctaatttattgagagttttttgcaggaagagttgttgaattttgtcaaaggccttttctgcatctcttgatatctcaagataatcacatggtttttttgtcattggttctgtttataaggtggattacgtttgttgatttgtgtatgttgaaccagccttgcatcccagagatgaagcccacttgatcatggtggataagctttttgatatgctgctggattcggtttgccagtattttattgaggatttttgcatagatcttcatcggagatattggtctaaaattctctttttttgttgtgtctctgccaggctttggtatcaggatgatgctgtcctcataaaatgagttagggaggttccctctttttccattgattggaatagtttcagaaggaatggtaccagctcctccttgtacctctggtagattttggctgtgaatccatctggtcctggactttttctggttggaaagctaattattaattattgcctcaatttcagagcctgttattggtctattcagagattcaaattcttcctggtttagtcttgggtgggtgtatgtgtcgaggaatttatccatttcttctagattttctagtttatttgcatagaggtgtttatagtattctctgatggtagtttgtatttctgtgggatcggtggtgatatccccttgggtttaataaacagataacatcaaacattcaactaatccaataaaaagaaattttattcatttgagaatgtgttttccagagcatacttatatattacgttttaacttcataatttatattttataaaaacataactaattcaagttaatcttctctaatttttaattcaattgaatttttatcaggatcactatatttaaacaaaaattacctgaatttttcacatcataatttatagattctgcttctacaaattgtctgtagggaccattatttctacacggtctactttcctgggttaagtggtggatacccaaatgttttttggaataatgttttcttatatcagtttttagtcagtgatacgttgcaccatgtttaattttaagcattatcagttttctttttttttttttattgatcattcttgggtgtttctcgcagagggggatttggcagggtcacaggacaatagtggagggaaggtcagcagataaacaagtgaacaaaggtctctggttttcctaggcagaggaccctgtggccttccgcagtgtttgtgtccctgggtacttgagattagggagtggtgatgactcttaaggagcatgctgccttcaagcatctgtttaacaaagcacatcttgcaccgcccttaatccattcaaccctgagtggatacagcccatgtttcagagagcacagggttgggggtaaggtcacagatcaacaggatcccaaggcagaagaatttttcttagtacagaacaaaatgaaaagtctcccatgtctacctctttctacacagacacggcaaccatccgatttctcaatcttttccccacctttcccccctttctattccacaaaaccgccattgtcatcatggcccattctcaatgagctgttgggtacacctcccagacggggtggtggcagggcagaggggctcctcacttcccagtaggggtggctgggcagaggcgcccttcacctcccggacggggcggctggccaggctgggggctgacccccccacctccctcctggacagggcggctggccgggcgaggggctgaccccctcacctccctcccggatggggcggctggccgggcggggggctgaccccccacctccctcccggacggggcggctgactgggcggggggctgacccccccacttccctcccggatggggtggctggccgggcagaggggctcctcagttcccagtaggggtggccgggcagaggcacccctcacctcccggacggggcggctggccgggcggggggctgacccgcccacctctctcccccccagaaggggtggctggccgggcggggggctgaccccccacctccctcccagacggggcggctggccgggcagagaggctcctcacttcccatcaggggctgccaggcagaggcacccctcacttcccggatggggcggctggccgggtggggggctaacccacccacctccctcccggaggaggcggctggccgggcgggcggctgaccccccacctcccttccggatggggtggctggccaggcggggggctgacccccccacctcactcccgaacgaggtggctgccgggcggagacgctcctcacttccgagacggggtgactgccgggcggaggggctcctcacttctcagacggggtggttgccaggcagagggtctcctcacttctcagacggggcggccgggcagagacattcctcacatcccggacggggcggcagggcagaggtgctccccacatctcagatgatgggcggccgggcagagacgctcctcacttcccagatgtgatggcggccgggaagaggcgctcgtcacttcctagatgggatggcggccgggcagagacgctcctcactttccagactgggcagccaggcagaggggctcctcacatcccagacgatgggcggccaggtggagacgctcctcacttcccagacggggtggcggccgggcagaggctgcaatctcggcactttgggaggccaaggcaggctgctgggaggtggaggttgtagcgagccaagatcacgccactgcactccagcctgggcaccattgagcactgagtgaacgagtctccgtctgcaatcccggcatctcgggaggccgaggctggcggatcactcgcggttaggagctcagcccggccaacacagcgaaaccccgtctccaccaaaaaaatacgaaaaccagtcaggcgtggcggcgcgcgcctgcaatcgcaggcactcggcaggctgaggcaggagaatcaggcagggaggttgcagtgagccgagatggcagcagtaccatccagcttcggctcggcatcagagggagaccgtggaaagagagggagagagagaccgtggggagatggagagggtgagggagagggagagggagagggagagctatcagttttctttcttgtgcattattttcacagtaatataaattatggacatcaaaatatcctcagggttaaaaacgttggagtccaagcattctatattcttgatttgtatggtttcacttatgactcagcattttaggaaaacattggctctataatctgtcaccctcaccccatttaaataaaaacatacttttttggacacaaggatcaggcatacacatctacacagtggatcacatcatttttgggggcaaactgaaaactgtttttatactcaaacatactgttgggaaactgtgaaataaaaatttctgatgtttgttaaaaattgggaagaaagacattaatactattgtagtagattttatggccatcgtaatagggttcagttcagaaattgatcataactctgaacacagacaacgaagaatttatagtcaataagcagaataaatcagtggataaaaattattgaaaaacatttgataaaataccaaaggaggaagaggaactttttatagcagaaggctggttacaggttggctaaggacttaaatatcaaagaaagggaatcacgatattagtagacataagggatatgtggatttttactaaacagtattagcaggatttatgaaagtgagcctctcaaaccaggagcagggcaagaagtcaaggttggcttagtcaaaaagagggttcagttaagcttgactaacatttggtcataaagggagtgcttacaagaacccagatttttttcccatctgatctgaaaataaataatcaccaaaaaaggctttgtttgaaaaatgagtgcccacttcacctgagaaaacctccatcttcttctgtttacctttgaatttagtgtagaaaaagagcacttgtcatcgccacagttttaattttgctttcactcttaaaaacagagagtcagggctgggtgtggttgttcatgcctgtaatcccagcattttgggcatggtgatgcaagcacacctgtaatcccagctacttgaaaggctgaggcaggagaatcacttgaacccaagagtcagaggtttcagtgagccaaaatcacaccactgcactccagcctggtgacagagtgagactccatcaaacaaaacaaaacaaaacaaaacaaaacaaaacaaaacacaaaattagaaatttagttttattcaaacagcaacttacaaacacaaaggttatagtttctgacccctattcaagacaattggttgtaaccataagtattgatgggacttcagggagattcctcagatggagctgatgcagctgtgcaagccactttgaccttgcatctttcctacttcttagcctttgaaatggacatggttgctggtgcaggcttgtgctcctacagccagccatatgggaccatgagacagcctacaggataaaaaccatctactgaaatattgtagcaaagtgtgccaagagggttgactagaagtagctatggtgtgtggctttcatgaaaagaaacaaagagggaaaataaatacagcaccatcaactgaaacacccagatatttgcagtgggactaatgaaggaaacagctcaacccatgggaaaaagaagggcatggcaaccgcccacccgggagtaacacagaccaaagggaacctaccctgcccaaggaagtggtgagcaaatacgtgaccctgagaaaccacacttctcccatggatctttgcaactctcggatcaggagattttctcgtaaacttattccaccagggcctttggtctgatacacagagctgcgtgttcccggcagaacaactgctcagacacaaacagaatcgcaggagctttacatattttggctctgagatctctggcaaaggtgactgcaactcagacaaggtgggaggttggatctccgtaaatgcccctagaaaggaagctgaatccatgggcctgagcagcatcagtgggccccacttccatgacgcctcacaggataagatcaactggcttggaattccatccagcccccagcaacagcattgcaattacctgggatggaacaacgttcctggaggcaggggctggctgctatatttgctgtttggatgactcagccattccagcctggaggtttaggagagttaaaaaaaaaaaaaactcatggcagatggaagaaatcccttagcacggcacattggccctcccaaagtttggccggactacttcttgaagtgggacccagatacctttttcatctcagagtggggcctcctaccagagcctccagacagccccttccatattctccggcaggcagagttttgatttattcctggatgcagtgcacattgggagcagtgggtcttcatatttgttgtttggagaactcagccataacaatcagtgggcttaggagagtccaaaccatcccagggaagaaggaatcccccagcatagcacagtggatctgccataatgtgatcagattgcttctttaagtgggacctaatatgctctgcatctctgggtggaacttcccaaccagggcctccagcaactcccactgatgttgtctggctggcagaggtttaaaaacttcctgggccagagttcctagagagaggggttggccaccatctttgctgtttcagccactttgctgtttcagcctccaggctttggagagcccaatctgatgaagggcagaaatggtaccccgcacagcatggctgatctatgaaagtggggctagatggcttaagtgggtccccaatcctattcctcctagctgggtgagacctaccaactggggtttccagtcacctcctacaggtgtgttcgagccctcaacatgtctgcacccgccctgggatggagctcccagggaagggagtgggctgctatctttcttgtttcacagccttcactggtgatacccccagatactggaaaatccgaggtgacaagagagtggagcagatgcccaacaaactacagcagccccacacaaaatggccaaacagttaaaaggaagagaaacaaacaaaaatctcattcaaaggccagcaacctcaaagattaaagatagataggcacacaaaggtgagaatcacaacaagaatactaaaaactcaaaaatcagggtgctctccctctcccaaatgaccacactacttctccagcaagagttcagaataagggtgaggctgtgatccctgaaataacagaagtagaccccagaatgtggataaaaatgaacttcactgatctaaaggagcatgctctaactcaatacaagaaagctaaaaattacaatataatattgcaggagctgacaaacaaattagccaggatagagaggagcctaaccaacccgatagcactgtaaaacacaatacaaaaatttcataatgcaatcacaagtattaatgaggaaagaaactcagagcttgaagtttgtatttctgaaagaagacatgcagagaagaatagaaaaaaagaatgaaaggaataaacaaaacctttgagaaatatgggattatgtaaagagaccaaatctacaactgattggtgtacttgaaagagctggggagaatggaaccaatcaggaaaacatatttcaggatatcatcaatgagaacttccccaaccttgctacactggccaacaattcagaaaatggagagaagttcagtaagatactccaagaaaaaatcatacccaagacacataaacgtcagattccccaaacttgaaatggaagaaaaaaaaagaaaaaaaagctcagccgcagagaaaagccaagtcacctacaaaaagaagttgatcagactaagagcagagctgtcagtgagaaccctacaagccaaaagagattgggggccaatatttaacgttcttaaagaaaataaactttaagccagaattttatatctggccaaactaagcttaatctggggagaaataacatccctttcagacaagcaaattccgagttaattcatgaacaccagacatgcttttcaagagctcctgaaggaagcaccaatttggaaagggaaaattattcccagccaccacaaaaacacactcaagtacacagaccattgacactataaatcaaccacataaacaagtctgaaaaataaaaataaccagctagcatcaagataacaagataaaatctacgcataacaatacttaccttaaatgtaaatgggataaatgccccagttgaaacacacagggtggcaattgtataaaaaccaagacccattggtatgctcttcaagacacccatctcacatgcggggacacacataggctaaaaataaagggatggaggaaatttcaccaagcaagtggaaaacctaaaaaagcaagggttgcagtcttactttccaacaaaacagactttaaagcaacacagattaaaaacaacaacaacaacaacaacaaagagggtcattacataacggcaaataattcaattcaacaagaattaactattctaaatatatatgcacccaacacaagagtacccagattcatataacaagtttctagatatcttgaaagagacttagaacaccacacaataatagtgaccgactttaacatcccactgacagtattagaaagattattgagacagaaaattaacaaagatgttcaggacctgaacttagctctggatcaaatggacatgatatatatttacagaactctccacatgaaaacagcagaatatacattcttctcatcactacatgacactttctctgaaattggtcacttagccagaagtaaaacactcttcagcaaatgcaaaagaactgaaatcataataaacagtggctcagatcacagcacaatcaaattaaaactcacgatgaaataatttactgaaaaccataaaattaaatggaaattgaatcacctgctcctgaataacttttgggtaaataatgaaattaaggcagatatcaaggagttctttgaaaccaatgagaacaaagacaaaacataccagaatctctgggacacagctaaggcagtattaagatgaaaatttatggcattaaatgcccacattaaaatgccagaaatgtctcaagttacaacttcacaacaaaaataactacaggaacaagagcaaagaagttctagagctagcagaagacaagaaataaccaaaatcagacctgaactgatggagatagggacaagagaaaccattcaacagatcaacaaattcaggagctgtttctttttctttgaaaaaaccaataatataaatacaccagtagtagactaataaggaagaaaatatcaaaaattaaaatgaacacaatcagaaataataagggttaccactgaccccacagaaataaaaataaccatcagaaaatatcataaacacctctatgcctataagataacaaattcagtagaaatggataaatttctggacacatacacccttcaagaataaaccaggaagaaattgaatccctgaaaagacaaacaacaggctctgaaattcaggcagtaataaatagcctacaaaccacaaaaagatcagaaacacaaagattaaaagctgaaggttatgacatttatgaagaagaactggtacaattcccactaaaattatttcaaaaaactgaaacagagggcttccttcccgactctttctatgagagcacatcatcctggtaccaaaacctggcagacacacaagaaaaaaaacaaaacttcaaaaaatttgcaagaagaaaacaaccccatcaaaaagtgggcgaaggacatgaacagacgcttctcaaaagaagacatttatgcacccaaaaaacacatgaaaaaatgctcaccatcactggccatcagagaaatgcaaatcaaaaccacaatgagataccatctcacaccagttagaatggcaatcattaaaaagtcaggaaacaacaggtgctggaggagatgtggagaaataggaacacttttacactgttggtgggactgtaaactagttcaaccattgtggaagtcagtgtggcaattcgtcagggatctagaactagaaataccatttgacccagccatcccatttctgggtatatacacaaaggactataaatcatgctgctttaaagacacaggcacacgtttgtttattgcggcactattcacaatagcaaagacttggaaccaacccaaatgtccaacaatgatagactggattaagaaaatgtggcacatatacaccatggaatactatgcagccataaaaaatgatgagttcatgtcctttgtagggacacggattaaattggaaatcatcattctcagtaaactatcacaagaacaaaaaaaccaaacaccgcatgttctcactcataggtgggaattgaacaatgagatcacatggacacaggaaggggaacatcacactctggggactgttgtgatgaggggggaggggagaaggatagcattgggagatatacctaatgctaaatgtcgagttaatgggtgcagcacacaagcatggtgcatgcgtacatatgtaactaacctgcacattgtgcacatgtaccctaaaacttaaagtataataataataaaataaaaaaagaaaaaaaaaaacttcatgccaatatttttgatgaacatttatgcaaacattcttaacaaaataggggcaaaccaaatccagcagcgcatcagaaagcttatccaccacaatcaagtaggctccatctgtgggatgcaactttaattcaacgtacacaaatcaatatgtgatttatcacataaacagaactaaagacaaaagccacatgattgtctgaatagatgcagataaatctttgcatccataaaattcaacatccattcttgtaaaaactctcaataaactaggtattgaaaaaaacatacttcaatataataagaaccatgtatgacaaacccacagccaatatcatactgaaagggcaaaagctgaaagcattcccttttaaaacgggcacaagacaaggatgccctctctcatgaatcctatttcagatagtattggaagtactgggcagagcaatcaggtaagagaaaaaggcattcaaattgaaagaaaagaaattaaacaacacctgatgtcagacgacatgattctatatcttgaaaacccctattgtctcaaccccaaagcttcttaagctgataaatatctttaacaaagtcccaagatacaaaataaatgggccaaaatcactagcactaaatccttatataccaacaacagtcaagccaagagcaaaatcgtgaatgaacactcattcacagttaccacaaaaagaataaaataccaaggaatgtatctaacaagagaagtgaaaggccactacaaggagaactataaaccacttctcaaagaaatcagacatgacataaacaaatagaaaaacatttcatgcttatggatagaaagagttaatattgttaaagtagacacactccacaaagaaatttatagagttaatagtatttccgttaaactaccaatgacatttttcacaaaactagaaaagctattttaaaatttatatggaaccaacaaaggcctgaatagtcaagacaaccccaaacaaaaagaactaagctggaggcatcacactacccaacttcaaactgtgctacagggctacagaaaccaaaacagcatggtactggtacaagaacagacacacagaccaatgaaacagaatagaggacccagaaataagactgcacacctacaactaactgatcttcgacaaacctgacaaaaacaagcaatgaaaaaacgactctgtactcaataaatggtgctgggataactgcctagccatgtgcaaaaaattgaaactgaaccccttcctccatcatcctctgcaactaacacaggaacagaaaactaaccaccgcatattctcactcataagtgggagttgaacaataagaacacatggacactggaagggaaacaacacaactggggctagtcagggaatgggagtcgaagggagggagagcattaggataactagctaatacatgtgggacttgaagcctggataacgggctgataggtgcagtaaaccaccatggcacacatataccaatgtaacaaacctacacattctgcacttgtacttcagaacccaatttaaatttaaaaaataaagaaagattccttacatcatatacaacaataaactcaacatggtttaaatgtaaaacccaagactataaaaactttggaagacaacctaggcaataccattcaggacataggcatgggcaaatattttatgatgaaggcgcaaaagcaattagaacaaagagaacattgacaaatgggatctaattaaactaaagagcttttgcacagcaaaagaaactatcaacagagtaaacagacaatgtatagaatgggagaaaatttttgcaaactgtgcatctgacaataatctaatttctagcatccataaggaacataaatttacacgagaaaaacaaacaaccttattaaaaattggccaaaggacacacagaaacacttcttgaaagaagacatacatgcagccaataagcgtatgaaacagaagttcaacatcagtgaccattagagaaatgtaaatccaaaccacaatgagatatcattttataccaggtataatggttaccatgaaaaaatcaaaaaatcacagatgctgacaaagttgtggagaaaaagcaacatttttaccctgttggtcgagttcaaacgttgtggaagacagtgtggtgattcttcaaagacctaaagaaaagaataccatttgacctagcaatctcattactgggtatatacccaaacaaatataagtcattctattataaagatacctgcacgcacaagttcatcacagccctattcacaatagcaaagacatcaaatcagcctacatgttcatcaataatagactggttgaagaaaacgtagttcatatacaacatggagtactatgcagccataaaaaagcacaagattatgtcctttgtagggacatggatggagctggaggccattatccttaaaaaactaacagaaacagaaaaccaaataccacattttctcacttataagtggagggtagatgatgagaacacacagaaacatggaggggagcaacacgcaccagggcctatcaggaggtagggggtgagaggagggagagaatcagaaaaaataactaatagttagtagacttaatacctgggtgataaaacaatctgcacaaccaaacttcgggacggtatgtttccatatttaaagaacctgcacatcctgcccatatacccctgaacttaaaacaaagttcaaaaaagaaaaacattttagcaaaatgacagactatttttgactaccttcgtgtacagttcagagtcagactgcccagctctaacatccttatttatgagaaagaaagcattctctctcttatctgcactattatattgggttttcttttttaatttttttgagacggagtttcactcttattgcccagactggagtgcaatggcgcgatctcggttcaccacaatctctacctcccgggttcaagcgattctcctgcctcagcctctcaagaagcagggattacaggcatgcaccactacgcctggaaaattttgtatttttggtagagactgggtttctctatgttggtcaggctggtcttaaactccagacctctggtgatccgtctgcctcaacctcccaatgtgttgggataacaggcgtgaactacagcacccggtctgggttttcttctatatgtaggaaaatgtaatcctaactaaagtgctagctttgccatggaatctctgtgtaattctggatgttatgtcactttcctaagacttttttctatctgcatagtggtggaggcagtagtggggaagatttaattatacaaagggtccatcaatccatgtgttaagtgaggatgtcactactttccagactcagaggacaggggacatattgttatgctccatggaagctgtttgggggtggaggtggggctcacttgcacacattgtctgtgggccttgaaagatcaagtgtgtatgacccttcttgaacagaaggtccatgtgcccagtgcagaacccatctatttcttcccaagtgaggaagatctgggaacaccctgatcacagccttgctacaccaatcctagttggtagggacgttagaccatatgcatgttgagctgtggcttaagcattttgacatctcacatctcattggatatctgaaaaactgaggtctggagagaagcagggactggcccagagatgatgaagtgggcagagtccaagggaaaaaagagcattctgacctcctaggccagggctcaacactctcatggggtttgttttgggaatgagtccctgagatcctggggatttttgccaattttctcgtcatatgaagcaaactcatgtctgcatcatagaattccacaggtttgtgcatacacacacagacttctcaggctaaaggtcataagaggagttaacgctgatggagtgatgagaagaaaaaagatagaggataggggcagctttgtcatggggtagaagcaccccatcttctggtaacatgcccaggacccataacatgggcaggggaaggcaataggctgatggcttgagaggctcaaggcttccatggatctgactgggctgcagccaacaccaggatagctttccaaggacaaaaccttactttctccattcattaatctgcataattaaaatggtaaggaatccccctacacccaatatggagaggaatacagtagtgaaaaccttcaatttttccctgtacaaattgacataattgaactgtgtgacccctaaatttgaaaggcttaaagaagtgagttgaccttgctgtctatcaattaccactgtactctcagaactttggaaattgctctgtgtcctccgaaggtctttcagagcagaaagtggcctaggggtgtgcgggactgagcactcaggctggtgtagaatgtgacagatcctcagaccactgctctgggatccaaggagaagaccttctcggtcagagctttggggatcttttttttggagggggcgatcttttttgaaagtggagacagaatcgttttccagggctccctcatttgccctcctgtttcatagtatttcttttttctgtctttctttctttctttctttctttctttctttcttctttctttctttcttctttctttttctttctttcttctttctttctttccttctttttctttctctttctttctttctccttcgtttcttttctttcttcctttctttcttctttctctttcttttgttcttccttcattccttccttccgtttctttctttcttctttctttctttcctcttccttcattccttccttccttttctttctttctttctttctttctctttctttctccttccttcctccctccctttcttttctttctttccttattttcttttttctttcttctttctttctttcttctttctttctttctttctttctttctttctttctttatcagagtctctctcttctcgctctttcacgggactggagtggagtggcatgatctcggctcactgcaacctccacctcccgggttcaagtgattcactgcaacctccacctcccaggttcaagtgattctcctgcctcagcctcctgagtagctgggaatataagggcgtgccaccaagcctggctaatttttgtattattagtagagacggggtttcgccatgttgtccaggatggtctcgatctcttcacctcgtgatctgcttgtatcagcctctgaaaaaaactgagattataggtgtgagccaccacacaaagcctacagtttatttttctttgcttgttaaaatgttttagtcagctaaaatttacacaatatagagttctacatactatctaatataaagtgtaaaattcagtgcttttcagtttatttacaatgctatgcaactgtcacccttatcaaattccaaaatagtttcatcaccctctcaccaaaaaaactccatatccattaagcagtaatttatcattcatccaccgaatttccttggtaaccactgattgactttctatctctagtactctctttctttctttccttttttttttttttttttggtgtctcactctgtcacccatgctagagtgcagtggcacgatctcggctcgctgcaagctccacctccctggttcacgccattctcctgcctcagcctccagggtagctgggactacagatgcctgtcagcacgcccagctatttttctttgtatttttagtagagacagggtttcaccatgttagccagcatggtctcgatctcctgacgtcgtgatctgcctgcttcggccacccaaagtgctgggattacaggcgtgagccatcacacccggcttctatttctagttttctattctagtcactttatagaaatataataatataatatgtgaccttttttctttggcttttctctttgagcgtgttttcattatttatccatgttgtggcacatatcagttctgtatttatttttatggctagctaatactccattgtataaataatattctattggccagggacgatggctcacacctataaactcagtattttgggaggctgaggctggtggatcacctgaggtcaggagttctagaccagcctggctgacatggtgaaacactgtgtctactaaaaatacaaaaattagccgggcgtggttcctgaaagcccaattgctcaggaggctgaggccagggaatctcttgaacccaggaggtggaggttacagtgagctgagatcgtgccactgcactccagcatgggtgacagagcaagactgtctcaaaaaaaaagaaagaaaatgagaggaaatatgtgcaaactacacagctgacaagcgattgataagcagaatacagaataaacaaaaaactaaataaaaaattagtttaactttaaaatgggcaataatcttcagaaacatttctggaaaatgtaaggggcataaacatagaacctaaaagttagagaagaattatgaaaaaactgaaggatatagaaaaaataatttcagactattcacattaaaatttaattagagagggggtggagccaagatgggcgaataggaaaagccttagtctagaactcccagcatcggcaatgcagaacacaggtgatttctgcatttccaactgaggtaccgggctcatctcactggggagtgtcagaaagtgggtgcaggacagtgggtgcagcgcaccccatgtgagccaaagcatggtgaggcatcgcctcacccaggaagtgcaaggggtcagggaataccctttcctagtcaaagaaaggggtgacagattgcacctggaaaatcgggtgactcccaccctaacactgtactgttccaaaggtcttagcaaacggcataccaggagattatatcctgcacctggctcagagggtcctacgcccacagagccacaatcattgctagcacagcagtctgagatcaaactgcaaggcaacaacaagcctgggggaggggcgcccaccattgccgtggcttgagtaggtaaacaaagcagccaggaagctccaactgggtggagccaactgcatctcaaggaggcctgcctgactctgtagactccacctctgggggcagggaatagccaaacaaatggcagcagaatcctctgcagacttaaatgtccctgtctgacagctttgaagagagtagtggttatcccagcatgcaactggagatctgagaacagacagactgcctcctcaagtgggtccctgacccccgagtagcctatctgggaagcatccccagtaggggcagactgacacctcacacggccgggtactcctctgagacaaaatttccagaggaacaatcaggcagcaatatttgcttttcaccaatatccgctgttctgcagcctccactgctgatacccaggcaaacagggtctggagtggacctccagcaaactccaacagacctgcagctgagggttctgactgttagaaggaaaactaacaaacagaaagtacatccacaacaaaatcccatctgtacatcacaatcatcaaagaccaaaggagagaaaactacaaagatggggaaaaaacagagcagaaaaacggaaaattctaaaaatcagagtatctctccacctccaaaggaacacagctcctcaccagcaatggaacaaagctggacagagaatgactttgacgaattgagagaagaaggcttcagacgatcaaactactccgagctaaaggaggaagttcaaacccatggcaaagaagtgaaaaacctttaaaaaaattagatgaatagctaactagaataaccaatgcagagaagttcgtaaaggacctgatggagctgaaaaccaatgtacgagaagtacgtgatgaatgcacaagcctcagtagccaattcgatgaactggaagaaagggtgtcagtgatggaagatcaaatgaatgaaatgaagtgagaaaagaagtttagagagaaaaagataaaaagaaatgaacaaaacctccaagaaatatgggactgtgtgaaaagaccaaatctacatctgattggtgtacctgaaagttatgaggagaatggaaacaagttggaaaacactctgaaggatattatccatgagaacttccccaatctagcaagggagggtgacattcaaattcaggaaatacagagaacaccaaaaagataatcctcaagaagagcaactccaagacacataattgtcagattcaccaaagttgaaatgaaggaaaaaatgttaagggcagccagagagaaaggtcgggttacccacaaagggaagcccatcagactaacagctgatctctcggcagaaactctacaagccagaagagtggggaacaatattcaacattcttaaagaaaagaattttcaatccagaatttcatattcattcaaactaagcttcataagtgaaggagaaataaaatcctttacatacaagcaaacgatgagagattttgtcaccaccaggcctgccctaaaagagctcctgaaggaagcactaaacatggaaaggaacaaccggtaccagccactgcaaaaacatgccaagttgtaaagaccatcgaggctaggaagaaactgcatcaactaacgagcaaaataaccagctaacatcataatgacaggatcaaatgcacacaaaacaatattaaccttaaaagtaaatggactaaattctcccattaaaagacacagactggcaaattggataaagagtcaagacccatcagtgttctgtattcaggaaacgcatctcacgtgcagagacacacataggctcaaaataaagggatggaggaagatctaccaagcaaatggaaaacagaaaaaggcaggggttacaatcctagtgtctgataaaacagactttaaaacaataaagatcaaaagagacaaagaagtccattacgtaatgataaagggatcaatgcaataagaagagctaattatcctgaatatatatgcacccaatataggagcacacagattcataaagcaagtccttagagacctagaaagagacttagactcccacacaatagtaatgggagattttaacaccccactgtcaacattagacatatcaatgagacagatagttaacaaggatatccaggaattgaactcagctctgcaccaagcagacctaatagacatctacagaactgtccaccccaaatcaacagaatatacattcttctcagcaccgcaccgcacttattccaaaattgaccacatagttggaagtaaagcactcctcagcaaattgtaaaagaacagaaattataaaaacctctctctcagaccacactgcaataaaactagaactcaggattaagaaactcactcaaaaccgctcaactacatggaaaccaaacaacctgctcccgaatgactactgggtacataacgaaacgaaggcagaaataaagatgttctttgaaagcaacgagaacaaagacacaacataccagaatctatgggacacattcaaagcagcgtgtagagggaaatttatagcactaaaggcccacaagagaaagcagagaagatctaaaattgacaccctatcatcacaattaaaagaactagagaagcaagagcaaacacattcaaaagctagcagaaggcaagaaataactaagatcagagcagaattgaaagaaatagaaacataaaaaacccttcaaaaaatcagtgaattcaggagctggtttttgaaacgatcaacaaaattgatagactgctagcaagactagtaaagaagaaaagagagaagaatcaaatagacgcaataaaaactgatcatttatgtggctcaagttctctaatataacatagtacggtcaaaatggaagggtaaaaattgcaagaccaccttaacgtttgtcatcttaagtgtactataaaaatgccttttaaattaattcagtgaataggtttttaagtgcatgttttagattatgctgaactgtcaaataccagcacatccctaatttgcagtagattaacagcactttttagcacacatcacagagttgttcggtggccaaattgaaaaggcacctcctctccatgtggtcattcagaaactcaaagttctttcattatttgtcttcatcatccatgagtcgtggttgccgtttgtgttcagtcccctgaaaataaagtactttaagaaatgcatgcgagaagacttgatggactcatcttaatgtgactcacatccatctcactctacaaccattaacaataactggtcacgtttccacatctcatgcaaatgaggctaagaaatgtaattctgctgtgtccctaataaatgggagaatagaatttgttgaatgaccagagttttccgtaacattgtgtcactcatatggatttactgtgtttctcaaatatttattaaacatctgtcatagccaagcactgtgataaggagtacagggaggacagagagctgactcagcagagtcctagtctgaaagaaactcacaatctaagaaaataagaaaagtcatgttaggtgctgctataaaggcacatgcacacgtatgtttattgtggcactactcacaatgcaaatacttggaaccaaccgaaatgtccaacaatgatagactggatcaagcaaatgtggcccatatacaccatggaatgctatgcagccataaaaaatgatgagttcatgtcctttgtgtgtacatggatgaagctggaaaagataattctcagcaaactatcacaaggacaaaaaaaaacaaacaccacatgttctcgcttataggtgggaattgaacaatgagaacacttggacacaggaagggtaacattacccactggggaatgttgttggggggggaggggggagggatagcatttggagatatacctaatgtaaatgacgagttaatgggtgcagctcaccaacatggcacatgtatacataagtaacaaacctgcacgttgtgcacatgtaccctagaacttaaagtataataaatatatgtataacatacgtatatattatatacatgttcaagggattctcctgcctcagcctcccaagtagctgggattacaagcgctgccattactcccagctattttttgtatttttagtagagaaggagttttgccatgttgaccaggacggtctggatctcctgacctcatgatccacaccccttggcctcccagagtgctgggattacaggtgtgagccacagcccccggcctatatgagttttcaaatagttttttctagctccgtaaaaaatttcattggcagtttgatggaaatagtattaaatctgtaaatttctttgtgaagtatagccattttagtgatattgcatcttcctatccgtgagcatgggatggttttccatttgtttgtatcttctctgatttctttgagcagtgttttgtaaatctcattgtagagctctttcacctccctggtgagctgcatttccagatattttattattttagtggcaattgtgaatgggatggcctttctgattttgctgtcagtgtggctatcgttggtgtagaaaaatgttagtgatctttgcacattgatttagtatcttgaaactttgctgaagctgtttgttaactaaagaagctttgtagatgaaactacagggttttctagatagagaattatgttatctgcaaacagaaatagtttggctttctctcttcctatttggatgttcttcggatttctttctctagcctgattgctctggtcagtactgtcaatactaagttgaatagaaatggcaagagagggcattcttgccttctactggttttaaaaaataatgttcccggcttttgcccattcaacacattgttggctgtgggtttcttatagacggcttttattattttctgcgtctattgagataatcatcttttttttgtttttagttctgtttatgtaatgtattacatttattgatttgcacatgatggaccaaccttgcgtcctaaggaggaagcctacttgatcatgacggattacctgtttgatgtgctgctggatttgcctcccaaatattttgttgagaacttttgtattgatgttcgtcaagaatgttggcctgaagttttctttcccttctttctttttttttttttttttgacggtgtctccctctgttgcccaggctggagtggattgcactggcgcgatctctgcttaatgcaatctctgcctcctgagttcacgccattctcctgcttcagcctcccaagtagctgggactacaggtgtctgctaccaagcccggctaattttttgtgtttttgttgtgtctctgcctgttttggtgtcaagatcatgctgtcctcatagaatgagttggggagaagaccctccttctcaatttttgggtatagtttctgtaggaattgtaccagctcttctttgtacatttggtagaatttggctgtaagtccataaagtccagagcttttttttttgattggcaagctacttattacctatttaatatcagagttttttactggtctgttcaggaaatcattgtcttcctggcttaatcttgagagagtgtgtatatctaggaatctatttatttcgttaaagttttctagtttgtgtgtataaagttgttcatgttagtgctgtccccagttaaataaaaacaactattagaaaccactaaagtttaacacttgtttttatatctttaatcaatttttatttaatttttctacttggaatgtgataaagattcaactttactggtttaaatgtggacttgttttcccagcatttcttgtgtaacaaactgtctttacataatgattaagacacacttttaaaaagacaaacaataatttatgaaagggttttttggagtatctattttatttatttgatctccacaattgttcttatgccactatcaaactgttataattttagtagctttttatgttttcaaatttaaaattgtgagccacctaattttgtccttcttttcaagattattctgtacattcagaggatgttcaaattccatatgaagttttaaatgagctattttctttttgcagaagaaaagttggaaaaatgaaaacttgggattacagtacatctgtacactcctttgggcagtggtattgtcatcttaacttcattaaatcttccggttcaggaacatggaatttgttgccagttatttaagtcctttttagtttttttcataaacattctgatcctgtattttttattgtacaagatatttacctccttattaaatttattgctaagaattatattattttaatgttgttgcgaacaattgttttcttaatttactgtcaaattgttaattgtatatggaaatgcagtttatgtttctgtgttgtaaaaataattatttcatgtctcaaatctagattagcaattcattcagaataaatatgctgtatatattactagtcatttaactttttccaataagctaaccaatttcaatatgtctaaatatgtaaaaatgttaaattgtgttagatttttcacttactctcacctgtcatttatctgtcagaattacattactgcgcactagaactttcatttctggggccgggcacggaggctcatgcctatattcctagcactttgtgaggccaaggcaggcggaccacctgagatcaggagttcgagacctgtctggccaatatggtaaaaccccgcctctactaaaaatacaaaaataagctgagcgtggtcttgggagactgtattcccagctactttggaggctgacactggagaatcacttgaacaatcccacgacacaaaacaaccgaggttagtcttcatgtcgaaagtcttcaatggattgtcttttatcacaggattgcttagtgcaacatttaatgggaaagatgcatgctactgagatgtagttctccacaagtctcttagagtttgttgttttgttgtggattacatcacatacctgtcctgttccacgttatttttcaaagatttttgtacacaaataacctggaaaaagggtagtagtttttctcttcaggtgaatggcagataaattactcaatcaatataataaagacaatttttctttgtgacgcaaaggttggacaggcttccatgtaacctactttaaaaagattgaggtttcttagtcttgagtctgctcagctatgacacaaatcttccccatgtacaatgtccatatgagccttttgaaatccttcaaaaaacgtagtatggacaaggagaactaatacaaatatgaggcttttgcctccaggtaagcagtaaatagtaggtattttttttcatacttcagtgtctcatgccttctaccagcatcgatgaaaatggaaggttaatatgttgtttacaaatgctataaaatcttagatacgtcacaattatttaattttggagatgactatggcatgctgagataaacacaactttctgaaaggggaaaaggaacaaatacttgaagagcttgcaagggatatgagaagttcccccaggaccaacagcaaattctctcggccaagtggttagtttggtgaagcaagagatcaagactctgctgtctgctaatgagactgatccttgagaggattataacaatgaacctgagagctttgcatgttcacttttctcctgctggaaaatcaaggagctcttaaagctaatgttgaggtttggatgagtccaaaacagtagaagttcatgtggttcagctgtgagcagcaaaaagactgcaaaaagccacattaagcaggttttgtaagtctctcctttacccacatgaaggaacccattccctctgcacttctaatttttgtcctttgtctacagctaacttcagcaactttaaatattaaactacatacgattggaggtttggatgggggaacacaaatgtatgtagttcctttggatatatgtatctaattcaccattctgtggagtcccttagggtgcacagggagatataggtgttagggtggctggaaatgctgacaaacctatcattctattaatccagttgcttccagataatggaaagcatggtaagtccactgacatccgtgaagatgagcacactgctacactttggctgtgaagtgagtttcttggtctgagcaatgctaagtggaatatcatagggatggatgagggattctgtgagtccatggagggtagttttggcagaattccacccagggaaagcaaatttgtatccatagtaagagcctactccagtgagtacaaactgttgccgcctatattataaaagttattcaacgtaataaatttactaccaggtgcctggtggatcaccctggaaatgatgtcatatcaaagactcagtgtagatctgtgctgctgtcaaattaaacattcagaattgactgtagccagactggcctttgggattcaaagttcatattgcttagcccgtgcattgcttctatttctgctactatgttcaccttgtttataagcccattgggtgatgatgggggtgacagggaagtaagaatgacccatactcacggaacaagacattctgtccacatcattatcaaaatcatgctctgatacggttaccccttagtagggattcatatagaacagacatatctttatgtaatttacccagtgagagaagtttatccacaaaagtttttctattttttttttttgccaggaattttgtaatcatgttccttccgtgtcattggtcatgtagccaattcatgggccacagcagtgttgcaggagtgagtatcataggatctcaaactcctgttcttaagcaatccttgcctcaacctcttaagtagctgagactataggtgcaccccacaacgcctaactaattttgttttatttttagtagagattagattttgctatgttttccaggctgttctcacactccccacctcaagcgattctcccagctttgcctgcaaagtgctttgactagagtcaaacctccacacccagcacctataatttgatattttaaacaatactatgtagcgaaagcaattacgaagttatctagggaaagaaagctcactatcacagtgtaaaattgtatagatatgatgcgggcatgtgtgtatacatgcttgcttgtgtgcataggtgcgtgttttctgagaaatggtaccttattgctaccaggctaggatagcattcatgttcttctgaagatgtcaaatattgaagctccaggattcatagaacaagattcctaagtggttcacgagagggtgaacgattgagtaatgggtattttggaagaaacaactggcctagggacaagaataagtgtgcaaatcatctgtgtgaaacacgctttcttcggagcacgcatttcatgcacttcattctactgtgacagatattgctactctgagtttgggagagattgaacctagggtctactgtgaaactctgtagactagacttctgtctgaggcagcccctgcctgtaaccgtaacctgcgccaaactccaatggagcattcttctcaatggataaatggaaattccggatgatccgatgggcagagagtgcgactgtttttttcaggagctctggttgaatggttttggggactttctgggaggatgctctgcacccagaaaagtagtccaacgggaatcatgagaaaatgggcgactccgtgtgcctccgtcccctcctacttcctcacccacccctccatcagggatcccacgtattccaggatgacacgtgttttagttgtctttgggcgacaactagcggcaaccgttattgaaaatgtaagctgtagagaacaaaaaaactctggtcgcctgttcacagctcactcactgcaacgttgaatcctgggcttaagcaatcctcctgcctcagcttcctgagtagctggaaatataggcatgtgccacaatgctgggcaatatttttaagtagtggtaatctctctcgatgtgttgcccaggttagtctcaaactcctgtcctctatccagcctcccaccttggtcttcagaagtcctgggattacaggcttgagccactgtgctcactcctataatttgatgttttcaacaatactatgtagtgaaatgcatcacgaagacattttgcaaaagaaagctcactatcacatataaagttgtatacttgtcatgtgcttacgtgagcgcatgttcttgcctgtctgaatgttttctgagaactgatcatcttttccccagggacactggttgaagagctgcggggattgtctgggagggtgtctcgggcccggaaacgtaatccaggagagatcagaagaccggcgaccccatgggcctccatctctttctccttccttgacaacccctaaaccagtgaccccactcattccaggctggaacgtcgttcggttgtcatttggcgtcacctagcggtcactgttattgaaaatggaggcatcacaccaaaacttctggccgcccgcgcacagccagggaaaactggtttctctcgggccccaccctgacctcagaggcactccttctgtccctccccctatgccttgttgcctaggaaacctccaccctggctgggaatgcttatttctttatttatttagagacagagacagtttcgctcttgtagcccaggttgaagttcaatggcgccatctcggctcactgcaacctctgcctcctggattcaagcgattctcctgcctcagcctccccactagctggtattacatgtgcctgcctctactcccagcaaatttttgtatttttagtagggacgtcatttcgccatgttggccagtctgttctcgaagtcctgacttcagatgatccacccacctcagcctcttaaagtgctgagtttacagaaataagccagggcgcctaggctatcatttgtttttctttcttccttttttttttttttttttttttttagtaagcatgaacagttctacctgggttttaaaaattgtgtgtgtgaaagaaaaataaatcttgaggcttccaaatcactaaagtaaagggaaaagtcaagctggcaactgtttagggccaacctgccattctattcaaagtcactcctctgctcttttctctttttttttttcttttttgagatggagtctcgctcagatgctcaagctggagcccagtggagcaatctcggctcactgcaacattcgcctcctggtttcaagcgataaatgtatatttgattgcctcctttggagaggctaattagaaactccaaagaatgcaaccatttgtctcttaactacctttgaccaggaagtcccctcctcactttcagtcttcccgcgtttgctaatttgtcccgcctttgcagaccgaaccaatgttcatcttgcatactttgattgatgtctcatgtctccctagaatgtataaaacgataatgttctctgtttaccttaggcacatgtcctcagaacctcctgaggctgtcacgggtatgcgtcctgaaccttggttacgtaaactttctaaattaactgagacctctctcaagttttcagggttcacaacggaaagtgcattgtagctccaccctagggcttaccattaagaaaaactatcctaaatctctgcagatacagtcaaaccggttgtatgtaaactgtatgaaactaaatgcacttattacaagtaaatgaataaatgctgagaaaaaaaatcatgaaccgctcacctttcaaagaagcaataatactatgaattatgtgtaatttccagagtcagctagtttcaaaattgtccccactaaacttggaaaggttccagagtgagctattgtgtctccagcctttgctcctcccccttctttcccctgcgccctcccctcaacctttgccggcaatcacattctctgattctgcaaaagcaggtgggagccctagagagagttctcgttttttttttttttttttttcttttttgagatggagtctcgcttagaggctcaggatggagcccaatggagcaatctcggctcactgcaacatccgcttcctggtttcaggcgattctactgcctcagcctaccgaggagctgggttaacaggcacccgttattatgcccagctaatttttgtattttcatagagacagggtttaaccatgttggccacgctggactcgaactcctgccatcaggtgatccgtcagcctcagcctttcaatgtgccgggattacaggcgtgagccactgtggccagcgagttctcttttctttgtgaagggcaaggcaaagtggaatggattcatctaaaagcggagtgcatgccctggaaaacatcatggttagacccatgtgagacaggttagttttactgcgtgtgttctccatgtgttgttgcccatgtgttgctaccatggtaatcctgctgagtatgagaggaatcaaagtttcacacatttggtgtatgtgcttgactgaggaaccaatggggtgaagctaccatctgtgggattatgactgaacgcctctaaatcagaatcccgcccagaagaaaggatgcagcagcgctggcaagactcggttggcctcagatagccagtccccagcctttgccaccggccggacgctccgccccgctgtgcgccaagaccttgctccggtcttatcatcctaaaaaatggggtgcggccccccatcctaaaaaacggggtgcggccagaaaggcgtttgctccctggcccgtcacataacatgcttatggggaatctgatactaaactattggtaaacgccctgcttctgggtcagggtttcctatggagcagagcaactccctcactgcaacctattgaaagtcagccctccacacaaggggctctcaaccagtgtgcgggaaaactagcgttgtggcgtgtcctgtataattcagccctggacctctaccttccttctttcctccttttgcccccggggacttagttcccgggcctgctcaggccccccgccccggagccccagggcatgcagggctgtctctcgcgagataacattggcgtcggccgtgcatttgggaggggtcgttccccaacagcaggctttccaagatgcagcgctgggggttgcgaggtagggttggcgcccctgctcgatgttccacctctctgattgagcttctttctcccatcccgctgggaattcctccacgagttgggaccggattcttcgagcctcgtgcgaatggctgaggcgcgggtgtcagaggttttgcccctgcagtccctgcctgagtagtgttcgcgcgatgcccgtgggtggctgttggggtcacagtccctctccccgcctcaggggtgctgggatgaaagactagctagtcactacccttgtgtctttactcctcttctctgtccgggtcaaccagcggactgcggggaaatggctggcaggtctgccaagttagacggcctcaaacctgggccggttctgtgtgataaggttccaactgcgtctgatcgcttccctccgcgagcaccacatttggtctttagggtggaccctgtcgattagatgctggcctttggcttcccgatcagcccgcgaatcagccgactgcgggaagcaagcaacatccagttgacacggccgcgggcttctctgtctggaagacctgggaccagggcctaaggccccagtcctcaggtctctggtcgccgtgcccacctgatgtccgcggcaagcgttggacttgaccgtcaacttgggatttctaaggtagaccagataactttggtcagcagcagtaccgcccgcattcactaggtgtcgctttttccttgcgttgtttcttcctctccaactgtttccacagtactttcagtttctcttcgttttgtttttcttttatttttcttgctcctctttctacacactgaagttgctgttgttttacatttaccttttatttatttgtagtttttgaggcaggttggagtgtaagaatgcaatctcggcttacagccgcctcgactttccaggactccctcaggtgatcttcctatctcagccttccaagtggctgagactacaggaatcacttaattctgtgatgtcgaagctgaagtgagccgtgatgatgccttgccctccagtctgagtgtttcagaaggtaagagagacaggttaaagaaaaaaattccttgaaataaactgcaattaactgtgatctaaattaccttttatagtttttcactcccacgagtttgtttattattattgctgcttattatttctttgtattattgtttgtcattattgttattgtttttattatttatgtaattatttagagatggagtcttcctctatcacccagagtgcagtgcagtggcgcgactttgggtcactgcagcttcaaatgcctgggttcaaattcgcaatatggcgaaacaccctgtttactaaaatctgtcaatgacaccttcaggaccgttggttgtggcggctgcaatttcggaggctgaggagggcagttcgctagagctcgggagttcaagacagcctcggaaacagactgcagagcatttgtctgaccaagacccgctgcagcctccacctcccgaccccaagcgatgttctcaactcaggctccaaaggatctgggaccacaggcgcctgccatcataatgcccggatttttttcttttcttttctttttcagtagagacggggtctcactgtgttgccagggctggtctcaaagtcctaggctctagcaattcttccaactcagcctcccaaagtgctgggattataggtgtgagccacaatgccctgccctcttttttatttccttcattttttctctttttttctttctctttctttctgtcttttctttttcttctctctttttcttcctcccttttttctctcatttctcattctttttttttctgtttctatgtcttttggttttctttttcatctttcttccctttacatctctgtctgtctattttctttttcttgatcttccttactctctctctcttttcttcatttctttctttccatccctctgtctgtctgtctttgtgtggattttggaaaattctccttattctgtatctccctgtgtatcacaagcctctgtgactttcactttgttgtttttcctccttgtcgcgtaaaaggcattcactgctcttttattttgatgctctgtggatgttcgaagggtggggaaaaagtggtccacgaatgtgattggtttcatgagagacacgagagacaaaagaacatatgatgattacttcgctaaatgccctgtttattctttcaactgcactcatacaagtaaggacgcagttggtgggttgagagatctctgtgtagtcatgactctgcaattatacttgacgagagcggtgatgatgaacgggcggcatggaaacctgcccttctttggtgtcagttgagcacagtgagaagagattcacaatggcctgtatctcaacctgatggtactgtgtttctgctctgatctttaggaatgagagaagcattcccgtgcattcctgcaacgtccttgaagttttctttttaaacttttcgattaactaacgtatttattaatttatttgagatggagtcttgttctgttggtcaggccatggcgcagtatcgggccactgcaacctccgcctcccaggttccagcgattctcttgccttagcctctcgagtagctgggataacaggcacgtgccaccatacccagctaacttttacctttttagtaaagacagggttttcccatgttgcccaggctggtcttgaactccaacttccaggaatcctgtggcctcgtcctcccaaagtgctgggagatcccaggtcatcagactcgagaaagaatgttggttgatatagaaaggcgagacacactgcgcccgacccaaattgctatttttaaaaataaaccagtaggctgggtgcagtgggccactcctctcatctcagcagtttgctaggcggatgtgggaggattacgaggtcaggagtttgagaccagcctggccaacatagtcaaactctgtctgtatgaagaatacaaaaattaaccaggtgtggtgtcacacacctctactcccagctactctatatgctgaggtagtagaatctgttgaagccgggagatggagattgcagtcagcccagatcatgccactggactccagcttgggtgacagagtcagattccatctaaaaaaaaaaaaagtaattaaaaataagtgagtttccaagaagaaatagaaacccgcagtgacacaaacatatgcatctcacctttcgaggcagcaatgacactacaaacttgtaaactcagttcatttcttgactgcggaccatgggtatttgtgatgcttcctcttggaacatagttctgtgtgacaccatacccagctaacatttgcctttttagtagtcagaattttgctatattgcccagactgctcttgaactcatgaactccaggtatccgcccgcccaaaaaaaagagttgtgatgaaaggagacacacagatggatttcagcccttaaaatggtgcatgctgccacatttcacagatcttccctgggccttactggtatttgcccaacatagaaatgctttctaaaaagtgacaatttgcttacataatatttccacaagcgatgccttggtctgtgtttgtttttacgttttgttttgtttgtagtttttactttacttatctcttttcagttgaagtagattttaccaattttaggaagatgtgtattttccccaaaacctgttagctggtgttttcttcggtcattaagtagcgattttcggaatctctcaaggtacagtgagagccgattggtataaactatacttcataaaatcttctttccttttcattttttttttttttttttttgtctttcaggtggagtttcgctcttattgcccaggctggagttcagtggcgtgacctcagctcaccgcaacctctgccgcctgtgttcaagagattttccagtcttcaccctttcgagtagctgaaaccacaggcaaacacctccaggcctggctaattttttttttttcatagagactaggtagctccataatggtcaggctggtctagaacacccaacctgaggcgtaccacccaacttgaccacccaaagtgctgagattaaaggcgtgagctccgcgtctggccataacatcttatcctatagaagcccagagaggttaggtatgtagtccctgagaccagccttccttggatgaactccaaagtgatggctgaggattagggagtgtggggtgggggctggaaagtcggtcccctattgttgctacctaggccatgacatccccagactcccatcgcctgctcaccgtttgagattcccccccaccaccgccttggtggctgaactcttactttaatttctgtctttcttcgtttgttgggtttcaggagggggtgcaggaaagacggtgtgcgtggggagggggtgtagggtggggatggaggggagcgtcctaagggtcgatgtagtgtcatgcctctttcatcaccaccaccgaagatgaaacaataatcatctaaataccgcgtgttctcacacataagtgggaactacataatgagaatgcatgcgaagaactagggggacgagagacgcaggagcctacctgagggaggacgtgtggaaggacagacagcttcaggacaaagcaaaacgagcagaacacaaaaactgtaggggactgcgctgagaatccgggtgaggaaatcatcggcacactgaaccccctactcagaagtttacctatgaaacaatcttgcacatgtatgcttcaaaaacaaataacagttagggaagaaagagagagagagagaaagagagagagacaagtaaaataaagcaccacctccttgacctgactcagggcgtttggggtcttctggggaaatgttctgaaacaatggagtattttggtctgttctttcttgtgtctttttttttttttttaagacggactctcgctcagccacccaggctggaatgcagtggtgcactgggttcactgcagcaaatatctcccgggttgaagcgattctccagtctcatcctcctgagtggccgggattacagtcacgcgccataatgccctgctaatttttgaacattagtagagaaggggtattgccatgcttgcgacgctggacttgaaggcaaaatgaaaatgaaaatgaaacgcaacaaaataattaaaaagtgagtttctggggaaaaagaagaaaagaaaaaagaaaaaaacaacaaaacagaacaaccccaccgtgacgtacacatacgcctctcgcctttcgaggcctcaaacacgttaggaattatgcgtgatttctttttttaacttcattttatgttattatcgtgattgatgtttcgagacggagtctcggaggcccgccctccctggttgcccagacaaccccgggagacagaccctggctgggcccgattgttcttctccttggtcaggggtttccttgtctttcttcgtgtctttaacccgcgtggactcttccgctcgggtttgacagatggcagctccactttaggccttgttgttgttggggactttcctgattctccccagatgtagtgaaagcaggtagatttgccttgcctggccttgcctggccttgccttttctttctttctttctttctttattactttctctttttcttcttcttcttcttcttttttttgagacagagtttcactcttgttgcccaggctagagggcaatggcgcgatctcggctcaccgcaccctccgcctcccaggttcaagcgattctcctgcctcagcctcctgattagctgggattacaggcatgggccaccgtgcctggctgatgtttgtacttttagtagagacggtgtttttccatgttggtcaggctggtctcccactcccaacctcaggtggtccgcctgccttagcctcccaaagtgctgggatgacaggcgtgagccaccgcgcccagcctctctctctctctctctctctctctctctctcgctcgcttgcttgcttgctttcgtgctttcttcctttcccgttttctttctttctttctttctttcgtttctttcatgcttgctttcttgcttgcttgcttgctttcgtgctttcttgctttcctgttttctttctttctttctttcttttgtttctttcttgcttgctttcttgcttgcttgcttgctttcgtgctttcttgctttcctgttttctttctttctttctttcttttctttctttcttgcttgctttcctgcttgcttgctttcgtgctttcttgttttctcgatttctttctttcttttgtttctttcctgcttgctttcttgcttgcttgctttcgtgctttcttgctttcctgttttctttctttctttctttcttttgtttctttcttgcttgctttcttgcttgcttgctttcgtgctttcttgttttctcgatttctttctttcttttgtttctttcctgcttgctttcttgcttgattgctttcgtgctttcttgctttcttgttttctttctttcttttgtttctttctttcttgcttccttgttttcttgctttcttgcttgcttgctttcgtgctttcttgttttcttgctttctttcttttgtttctttcttgcttgctttcttgcttccttgttttcttgctttcttgcttgcttgctttcgtgctttcttgctttcttttctttctttcttttctttttctttctttctttctttcttgctttcttttctttcattcattccttctttcttttctttctttcttccttccttccttccttccttcctttctttctttctttctgtttcgtccttttgagacagagtttcactcttgtttccacggctagagtgcaatggcgcggtcttggctcaccgcaccttccgcctcccgggttcgagcgcttctcctgcctcagcctcccgattagcggggattacagggaggcacccccacgcctggcttggctgatgtttgtgtttttagtaggcacgccgtgtctctccatgttgctcaggctggtctccaactcccgacctcctgtgatgcgcccacctcggcctctcgaagtgctgggatgacgggcgtgagccaccgtgcccggcctgttgactcatttcgcttttttatttctttcgtttccacgcgtttacttatatgtattaatgtaaacgtttctgtacgcttatatgcaaacaacgacaacgtgtatctctgcattgaatactcttgcgtatggtaaatacgtatcggttgtatggaaatagacttctgtatgatagatgtaggtgtctgtgttatacaaataaatacacatcgctctataaagaagggatcgtcgataaagacgtttattttacgtatgaaaagcgtcgtatttatgtgtgtaaatgaacgagcgtacgtagttatctctgttttctttcttcctctccttcgtgtttttcttccttcctttcttcctttctctccttctttaggtttttcttcctctcttcctttccttctttctctctttctgtccttttttccttcgtgctttatttctctttcgttccctgtgtttccttcttttttctttcctctctgtttctttttcccttctttccttcgtttctttcctcattctttctctctttttcgtgtttctttccttcccgtctgtcttttaaaaaatggagtgtttcagaagtttactttgtgtatctacgttttctaaattgtctctcttttctccattgtcttcctccctccctccctccctccctccctgctcccttccctccctccttccctttcgccatctgtctcttttccccactcccctccccccgtctgtctctgcgtggattccggaagagcctacgcattctgcctctccgtgtgtctgcagcgacccgcgaccgagtccttgtgtgttctttctccctccctccctccctccctccctccctccctgcttccgagaggcatctccaaacacccacgcgccgtgggttgtcttctgactctgtcgcggtcgaggcagagacgcgttttgggcaccgtttgtgtggggttggggcagaggggctgcgttttcggcctcgggaagagcttctcgactcacggtttcgctttcgcggtccacgggccgccctgccagccggatctgtctcgctgacgtccgcggcggttgtcgggctccatctggcggccgctttgagatcgtgctctcggcttccggagctgcggtggcagctgccgagggaggggaccgtccccgctgtgagctaggcagagctccggaaagcccgcggtcgtcagcccggctggcccggtggcgccagagctgtggcgcgtcgcttgtgagtcacagctctggcgtgcaggtttatgtgggggagaggctgtcgctgcgcttctgggcccgcggcgggcgtggggctgcccgggccggtcgaccagcgcgccgtagctcccgaggcccgagccgcgacccgcggggacccgccgcgcgtggcgcgggaggctggggacgcccttcccggcccggtcgcgggtccgcgctcatcctggccgtctgaggcggcggccgaattcgtttccgagtccccgtggggagccggggaccgtcccgcccccgtcccccgggtgccggggagcggtccctctgccgcgatcctttctggcgagtccccgtgcggagtcggagagcgctccctgagcgcgcgtgcggcccgagaggtcgcgcctggccggccttcggtccctcgtgtgtcccggtcgtaggaggggccggccgaaaatgcttccggctcccgctctggagacacgggccggccccctgcgtgtggcacgggcggccgggagggcgtccccggcccggcgctgctcccgcgtgtgtcctggggttgaccagagggccccgggcgctccgtgtgtggctgcgatggtggcgtttttggggacaggtgtccgtgtcgcgcgtcgcctgggccggcggcgtggtcggtgacgcgacctcccggccccgggggaggtatatctttcgctccgagtcggcattttgggccgccgggttattgctgacacgctgtcctctggcgacctgtcgctggagaggttgggcctccggatgcgcgcggggctctggcctaccggtgacccggctagccggccgcgctcctgcttgagccgcctgccggggcccgcgggcctgctgttctctcgcgcgtccgagcgtcccgactcccggtgccggcccgggtccgggtctctgacccacccgggggcggcggggaaggcggcgagggccaccgtgcccccgtgcgctctccgctgcgggcgcccggggcggccgcgacaaccccaccccgctggctccgtgccgtgcgtgtcaggcgttctcgtctccgcggggttgtccgccgccccttccccggagtggggggttggccggagccgatcggctcgctggccggccggccggcctccgctcccggggggctcttcgtgatcgatgtggtgacgtcgtgctctcccgggccgggtccgagccgcgacgggcgaggggcggacgttcgtggcgaacgggaccgtccttctcgctccgccccgcgggggtcccctcgtctctcctctccccgcccgccggcggtgcgtgtgggaaggcgtggggtgcggaccccggcccgacctcgccgtcccgcccgccgccttctgcgtcgcgggtgcgggccggcggggtcctctgacgcggcagacagccctcgctgtcgcctccagtggttgtcgacttgcgggcggcccccctccgcggcggtgggggtgccgtcccgccggcccgtcgtgctgccctctcggggggtttgcgcgagcgtcggctccgcctgggcccttgcggtgctcctggagcgctccgggttgtccctcaggtgcccgaggccgaacggtggtgtgtcgttcccgcccccggcgccccctcctccggtcgccgccgcggtgtccgcgcgtgggtcctgagggagctcgtcggtgtggggttcggggcggtttgagtgagacgagacgagacgcgcccctcccacgcggggaagggcgcccgcctgctctcggtgagcgcacgtcccgtgctcccctctggcgggtgcgcgcgggccgtgtgagcgatcgcggtgggttcgggccggtgtgacgcgtgcgccggccggccgccgaggggctgccgttctgcctccgaccggtcgtgtgtgggttgacttcggaggcgctctgcctcggaaggaaggaggtgggtggacgggggggcctggtggggttgcgcgcacgcgcgcaccggccgggcccccgccctgaacgcgaacgctcgaggtggccgcgcgcaggtgtttcctcgtaccgcagggccccctcccttccccaggcgtccctcggcgcctctgcgggcccgaggaggagcggctggcgggtggggggagtgtgacccaccctcggtgagaaaagccttctctagcgatctgagaggcgtgccttgggggtaccggatcccccgggccgccgcctctgtctctgcctccgttatggtagcgctgccgtagcgacccgctcgcagaggaccctcctccgcttccccctcgacggggttgggggggagaagcgagggttccgccggccaccgcggtggtggccgagtgcggctcgtcgcctactgtggcccgcgcctcccccttccgagtcgggggaggatcccgccgggccgggcccggcgtcccagcgggttgggacgcggcggccggcgggcggtgggtgtgcgcgcccggcgctctgtccggcgcgtgactccctccgccgcgagtcggctctccgcccgctcccgtgccgagtcgtgaccggtgccgacgaccgcgtttgcgtggcacggggtcgggcccgcctggccctgggaaagcgtcccacggtgggggcgcgccggtctcccggagcgggaccgggtcggaggatggacgagaatcacgagcgacggtggtggtggcgtgtcgggttcgtggctgcggtcgctccggggcccccggtggcggggccccggggctcgcgaggcggttctcggtgggggccgagggccgtccggcgtcccaggcggggcgccgcgggaccgccctcgtgtctgtggcggtgggatcccgcggccgtgttttcctggtggcccggccgtgcctgaggtttctcccggagccgccgcctctgcgggctcccgggtgcccttgccctcgcggtccccggccctcgcccgtctgtgccctcttccccgcccgccgcccgccgatcctcttcttccccccgagcggctcaccggcttcacgtccgttggtggccccgcctgggaccgaacccggcaccgcctcgtggggcgccgccgccggccactgatcggcccggcgtccgcgtcccccggcgcgcgccttggggaccgggtcggtggcgccccgcgtggggcccggtgggcttcccggagggttccgggggtcggcctgcggcgcgtgcgggggaggagacggttccgggggaccggccgcgactgcggcggcggtggtggggggagccgcggggatcgccgagggccggtcggccgccccgggtgccgcgcggtgccgccggcggcggtgaggccccgcgcgtgtgtcccggctgcggtcggccgcgctcgagggtcccgtgcgtcccctttccccgccggccgcctttctcgcgccttccccgtcgccccgcctcgccgtggtctctcgtcttctcccggcccgctcttccgaaccgggtcggcgcgtcccccgggtgcgctcgcttcccgggcctgccgcggccctttccccgaggcgtccgtcccgggcgtcggcgtcggggagagcccgtcctccccgcgtggcgtcgcccgttcggcgcgcgcgtgcccgagccggcccggtggtccctcccggacaggcgttcgtgcgacgtgtggcgtgggtcgacctccgccttgccggtcgctcgccctctccccgggtcggggggtggggcccgggccgggcctcggccccggtcgcggtcccccgtcccgggcggggcgggcgcgccggccggcctcggtcgccctcccttggccgtcgtgtggcgtgtgccacccctgcgccgcgccgccggcggggctcggagccgggcttcggacggccccgggcactcgaccggaccggtgcgcgggcgctgcggcgcacggcgcgactgtccccgggccgggcaccgcggtccgcctctcgctcgcgcccggacgtcgggtgcccgcggggcggcggagcgccgtccccgcctgcgcgcgcccgcgggcgccatgcgcgcgcgcgtggccgccggtccctcccggccgccgggcgcgggtcgggccgtccgcctcctcgcgggcgggcgcgacgaagaagcgtcgcgggtctgtggcgcggggccccggtggtcgtgtcgcgtggggggcgggtggttggggcgtccggttcgccgcgccccgccccggccccaccggtcccggccgccgcccccgcgcccgctcgctccctcccgtccgcccgtccgcggcccgtccgtccgtccgtccgtcgtcctcctcgcttgcggggcgccgggcccgtcctcgcgaggccccccggccggccgtccggccgcgtcggggcctcgccgcgctctaccttacctacctggttgatcctgccagtagcatatgcttgtctcaaagattaagccatgcatgtctaagtacgcacggccggtacagtgaaactgcgaatggctcattaaatcagttatggttcctttggtcgctcgctcctctcctacttggataactgtggtaattctagagctaatacatgccgacgggcgctgacccccttcgcgggggggatgcgtgcatttatcagatcaaaaccaacccggtcagcccctctccggccccggccggggggcgggcgccggcggctttggtgactctagataacctcgggccgatcgcacgccccccgtggcggcgacgacccattcgaacgtctgccctatcaactttcgatggtagtcgccgtgcctaccatggtgaccacgggtgacggggaatcagggttcgattccggagagggagcctgagaaacggctaccacatccaaggaaggcagcaggcgcgcaaattacccactcccgacccggggaggtagtgacgaaaaataacaatacaggactctttcgaggccctgtaattggaatgagtccactttaaatcctttaacgaggatccattggagggcaagtctggtgccagcagccgcggtaattccagctccaatagcgtatattaaagttgctgcagttaaaaagctcgtagttggatcttgggagcgggcgggcggtccgccgcgaggcgagccaccgcccgtccccgccccttgcctctcggcgccccctcgatgctcttagctgagtgtcccgcggggcccgaagcgtttactttgaaaaaattagagtgttcaaagcaggcccgagccgcctggataccgcagctaggaataatggaataggaccgcggttctattttgttggttttcggaactgaggccatgattaagagggacggccgggggcattcgtattgcgccgctagaggtgaaattcttggaccggcgcaagacggaccagagcgaaagcatttgccaagaatgttttcattaatcaagaacgaaagtcggaggttcgaagacgatcagataccgtcgtagttccgaccataaacgatgccgaccggcgatgcggcggcgttattcccatgacccgccgggcagcttccgggaaaccaaagtctttgggttccggggggagtatggttgcaaagctgaaacttaaaggaattgacggaagggcaccaccaggagtggagcctgcggcttaatttgactcaacacgggaaacctcacccggcccggacacggacaggattgacagattgatagctctttctcgattccgtgggtggtggtgcatggccgttcttagttggtggagcgatttgtctggttaattccgataacgaacgagactctggcatgctaactagttacgcgacccccgagcggtcggcgtcccccaacttcttagagggacaagtggcgttcagccacccgagattgagcaataacaggtctgtgatgcccttagatgtccggggctgcacgcgcgctacactgactggctcagcgtgtgcctaccctacgccggcaggcgcgggtaacccgttgaaccccattcgtgatggggatcggggattgcaattattccccatgaacgaggaattcccagtaagtgcgggtcataagcttgcgttgattaagtccctgccctttgtacacaccgcccgtcgctactaccgattggatggtttagtgaggccctcggatcggccccgccggggtcggcccacggccctggcggagcgctgagaagacggtcgaacttgactatctagaggaagtaaaagtcgtaacaaggtttccgtaggtgaacctgcggaaggatcattaacggagcccggagggcgaggcccgcggcggcgccgccgccgcgcgcttccctccgcacacccacccccccaccgcgacgcggcgcgtgcgcgggcggggcccgcgtgcccgttcgttcgctcgctcgttcgttcgccgcccggccccgccggccgcgagagccggagaactcgggagggagacgggggagagagagagagagagagaaagagaaagaagggcgtgtcgttggtgtgcgcgtgtcgtggggccggcgggcggcggggagcggtccccggcagcggccccgacggcgtgggtgtcggcgggcgcgggggcggttctcggcggcgtcgcggcgggtctgggggtctcggtgccctcctccccgccggggcccgtcgtccggccccgccgcgccggctccccgtcttcggggccggccggattcccgtcgcctccgccgcgccgctccgcgccgccgggcacggccccgctcgctctccccggccttcccgctagggcgtctcgagggtcgggggccggacgccggtcccctcccccgcctcctcgtccgcccccccgccgtccaggtacctagcgcgttccggcgcggaggtttaaagaccccttggggggatcgcccgtccgcccgtgggtcgggggcggtggtgggcccgcgggggagtcccgtcgggaggggcccggcccctcccgcgcctccaccgcggactccgctccccggccggggccgcgccgccgccgccgccgcggcggccgtcgggtgggggctttacccggcggccgtcgcgcgcctgccgcgcgtgtggcgtgcgccccgcgccgtgggggcgggaacccccgggcgcctgtggggtggtgtccgcgctcgcccccgcgtgggcggcgcgcgcctccccgtggtgtgaaaccttccgacccctctccggagtccggtcccgtttgctgtctcgtctggccggcctgaggcaaccccctctcctcttgggggggggcggggggacgtgccgcgccaggaagggcctcctcccggtgcgtcgtcgggagcgccctcgccaaatcgacctcgtacgactcttagcggtggatcactcggctcgtgcgtcgatgaagaacgcagctagctgcgagaattaatgtgaattgcaggacacattgatcatcgacacttcgaacgcacttgcggccccgggttcctcccggggctacgcctgtctgagcgtcgcttgccgatcaatcgcccccgggggtgcctccgggctcctcggggtgcgcggctgggggttccctcgcagggcccgccgggggccctccgtccccctaagcgcagacccggcggcgtccgccctcctcttgccgccgcgcccgccccttccccctccccccgcgggccctgcgtggtcacgcgtcgggtggcgggggggagaggggggcgcgcccggctgagagagacggggagggcggcgccgccgccgcccgcgaagacggagagggaaagagagagccggctcgggccgagttcccgtggccgccgcctgcggtccgggttcctccctcggggggctccctcgcgccgcgcgcggctcggggttcggggttcgtcggccccggccgggtggaaggtcccgtgcccgtcgtcgtcgtcgtcgcgcgtcgtcggcggtgggggcgtgttgcgtgcggtgtggtggtgggggaggaggaaggcgggtccggaaggggaagggtgccggcggggagagagggtcgggggagcgcgtcccggtcgccgcggttcgccgcccgcccccggtggcgcccggcgtccgccgaccgccgctcccgcgcccctcctcctcccccgccgcccctcctccgagggcccgccctgtcctcctcgccctccccgcgcgtacgcgcgcccgcccgcccggctcgcctcgcggcgcgtcggccggggccgggagcccgccccgcggcccgcccggccgcgcccgtggccgcggcgccggggttcgcgtgtccccggcggcgacccgcgggacgccgcggtgtcgtccgccgtcgcgcgcccgcctccggctcgcggccgcgccgcgccgcgccggggccccgtcccgagcttccgcgtcggggcggggcggctccgccgccgcgtcctcggacccgtccccccgacctccgcgggggagacgggtcggggcgtgcggcgcccgtcccgcccccggcccgtgcccctccctccggtcgtcccgctccggcggggcggcgcgggggtgccctcggccgcggctctctctcccgtcgcctctccccctcgccgggcccgtctcccgacggagcgtcgggcgggcggtcgggccggcgcgattccgtccgtccgtccgccgagcggcccgtccccctccgagacgcgacctcagatcagacgtggcgacccgctgaatttaagcatattagtcagcggaggaaaagaaactaaccaggattccctcagtaacggcgagtgaacagggaagagcccagcgccgaatccccgccccgcggcggggcgcgggacatgtggcgtacggaagacccgctccccggcgccgctcgtggggggcccaagtccttctgatcgaggcccagcccgtggacggtgtgaggccggtagcggcccccggcgcgccgggcccgggtcttcccggagtcgggttgcttgggaatgcagcccaaagcgggtggtaaactccatctaaggctaaataccggcacgagaccgatagtcaacaagtaccgtaagggaaagttgaaaagaactttgaagagagagttcaagagggcgtgaaaccgttaagaggtaaacgggtggggtccgcgcagtccgcccggaggattcaacccggcggcgggtccggccgtgtcggcggcccggcggatctttcccgccccccgttcctcccgacccctccacccgccctcccttcccccgccgcccctcctcctcctccccggagggggcgggctccggcgggtgcgggggtgggcgggcggggccgggggtggggtcggcgggggaccgtcccccgaccggcgaccggccgccgccgggcgcatttccaccgcggcggtgcgccgcgaccggctccgggacggctgggaaggccggcggggaaggtggctcggggggccccgtccgtccgtccgtccgtcctcctcctccccgtctccgccccggccccgcgtcctccctcgggagggcgcgcgggtcggggcggcggcggcggtggcggcggcggcggcggcggcgggaccgaaaccccccccgagtgttacagcccccccggcagcagcactcgccgaatcccggggccgagggagcgagacccgtcgccgcgctctcccccctcccggcgcccacccccgcggggaatcccccgcgaggggggtctcccccgcgggggcgcgccggcgtctccttgtggggggaccgggccacccctcccacggcgagaagactgtcccacccatcctccccgcgcccccgccccggcgacggggggggtgccgcgcgcgggtcggggggcggggcggactgtccccagtgcgccccgggcgggtcgcgccgtcgggcccggggggaggttctctcggggccacgcgcgcgtcccccgaagagggggacggcggagcgagcgcacggggtcggcggcgacgtcggctacccacccgacccgtcttgaaacacggaccaaggagtctaacacgtgcgcgagtcgggggctcgcacgaaagccgccgtggcgcaatgaaggtgaaggccggcgcgctcgccggccgaggtgggatcccgaggcctctccagtccgccgagggcgcaccaccggcccgtctcgcccgccgcgccggggaggtggagcacgagcgcacgtgttaggacccgaaagatggtgaactatgcctgggcagggcgaagccagaggaaactctggtggaggtccgtagcggtcctgacgtgcaaatcggtcgtccgacctgggtataggggcgaaagactaatcgaaccatctagtagctggttccctccgaagtttccctcaggatagctggcgctctcgcagacccgacgcacccccgccacgcagttttatccggtaaagcgaatgattagaggtcttggggccgaaacgatctcaacctattctcaaactttaaatgggtaagaagcccggctcgctggcgtggagccgggcgtggaatgcgagtgcctagtgggccacttttggtaagcagaactggcgctgcgggatgaaccgaacgccgggttaaggcgcccgatgccgacgctcatcagaccccagaaaaggtgttggttgatatagacagcaggacggtggccatggaagtcggaatccgctaaggagtgtgtaacaactcacctgccgaatcaactagccctgaaaatggatggcgctggagcgtcgggcccatacccggccgtcgccggcagtcgagagtggacgggagcggcgggggcggcgcgcgcgcgcgcgcgtgtggtgtgcgtcggagggcggcggcggcggcgggggtgtgtggggtcctcccccgccccccccccacgcctcctcccctcctcccgcccacgccccgctccccgcccccggagccccgcggacgctacgccgcgacgagtaggagggccgctgcggtgagccttgaagcctagggcgcgggcccgggtggagccgccgcaggtgcagatcttggtggtagtagcaaatattcaaacgagaactttgaaggccgaagtggagaagggttccatgtgaacagcagttgaacatgggtcagtcggtcctgagagatgggcgagcgccgttccgaagggacgggcgatggcctccgttgccctcggccgatcgaaagggagtcgggttcagatccccgaatccggagtggcggagatgggcgccgcgaggcgtccagtgcggtaacgcgaccgatcccggagaagccggcgggagccccggggagagttctcttttctttgtgaagggcagggcgccctggaatgggttcgccccgagagaggggcccgtgccttggaaagcgtcgcggttccggcggcgtccggtgagctctcgctggcccttgaaaatccgggggagagggtgtaaatctcgcgccgggccgtacccatatccgcagcaggtctccaaggtgaacagcctctggcatgttggaacaatgtaggtaagggaagtcggcaagccggatccgtaacttcgggataaggattggctctaagggctgggtcggtcgggctggggcgcgaagcggggctgggcgcgcgccgcggctggacgaggcgccgccgccccccccacgcccggggcacccccctcgcggccctcccccgccccaccccgcgcgcgccgctcgctccctccccgccccgcgccctctctctctctctctcccccgctccccgtcctcccccctccccgggggagcgccgcgtgggggcggcggcggggggagaagggtcggggcggcaggggccggcggcggcccgccgcggggccccggcggcgggggcacggtcccccgcgaggggggcccgggcacccggggggccggcggcggcggcgactctggacgcgagccgggcccttcccgtggatcgccccagctgcggcgggcgtcgcggccgcccccggggagcccggcgggcgccggcgcgcccccccccccaccccacgtctcgtcgcgcgcgcgtccgctgggggcggggagcggtcgggcggcggcggtcggcgggcggcggggcggggcggttcgtccccccgccctacccccccggccccgtccgccccccgttcccccctcctcctcggcgcgcggcggcggcggcggcaggcggcggaggggccgcgggccggtcccccccgccgggtccgcccccggggccgcggttccgcgcggcgcctcgcctcggccggcgcctagcagccgacttagaactggtgcggaccaggggaatccgactgtttaattaaaacaaagcatcgcgaaggcccgcggcgggtgttgacgcgatgtgatttctgcccagtgctctgaatgtcaaagtgaagaaattcaatgaagcgcgggtaaacggcgggagtaactatgactctcttaaggtagccaaatgcctcgtcatctaattagtgacgcgcatgaatggatgaacgagattcccactgtccctacctactatccagcgaaaccacagccaagggaacgggcttggcggaatcagcggggaaagaagaccctgttgagcttgactctagtctggcacggtgaagagacatgagaggtgtagaataagtgggaggcccccggcgcccccccggtgtccccgcgaggggcccggggcggggtccgccggccctgcgggccgccggtgaaataccactactctgatcgttttttcactgacccggtgaggcgggggggcgagccccgaggggctctcgcttctggcgccaagcgcccggccgcgcgccggccgggcgcgacccgctccggggacagtgccaggtggggagtttgactggggcggtacacctgtcaaacggtaacgcaggtgtcctaaggcgagctcagggaggacagaaacctcccgtggagcagaagggcaaaagctcgcttgatcttgattttcagtacgaatacagaccgtgaaagcggggcctcacgatccttctgaccttttgggttttaagcaggaggtgtcagaaaagttaccacagggataactggcttgtggcggccaagcgttcatagcgacgtcgctttttgatccttcgatgtcggctcttcctatcattgtgaagcagaattcaccaagcgttggattgttcacccactaatagggaacgtgagctgggtttagaccgtcgtgagacaggttagttttaccctactgatgatgtgttgttgccatggtaatcctgctcagtacgagaggaaccgcaggttcagacatttggtgtatgtgcttggctgaggagccaatggggcgaagctaccatctgtgggattatgactgaacgcctctaagtcagaatcccgcccaggcggaacgatacggcagcgccgcggagcctcggttggcctcggatagccggtcccccgcctgtccccgccggcgggccgccccccccctccacgcgccccgcgcgcgcgggagggcgcgtgccccgccgcgcgccgggaccggggtccggtgcggagtgcccttcgtcctgggaaacggggcgcggccggagaggcggccgccccctcgcccgtcacgcaccgcacgttcgtggggaacctggcgctaaaccattcgtagacgacctgcttctgggtcggggtttcgtacgtagcagagcagctccctcgctgcgatctattgaaagtcagccctcgacacaagggtttgtccgcgcgcgcgcgcgcgcgcgcgtgcggggggcccggcggggcgtgcgcgtccggcgccgtccgtccttccgttcgtcttcctccctcccggcctctcccgccgaccgcgggcgtggtggtgggggtgtgggggggagggcgcgcgaccccggtcggcgcgccccgcttcttcggttcccgcctcctccccgttcaccgccggggcggctcgtccgctccgggccgggacggggtccggggagcgtggtttgggagccgcggaggcggccgcgccgagccgggcccgtggcccgccggtccccgtcccgggggttggccgcgcgggccccggtggggcggccacccggggtcccggccctcgcgcgtccttcctcctcgctcctccgcacgggtcgaccagcagaccgcgggtggtgggcggcgggcggcgacgccctctcgctctctctctgtctctgtgtgtgtctgtctctctccctccctccctccctccctccctccctccctccctccctccctccccttccttggtgccttctcggctcttgagacttagccgctgtctcgccgtgccccgggtcgaccggcgggccttctccaccgagcggcgtgtaagagtgcccgtcgggacgagccggacccgccgcgtccccgtctcggtcggcacctccggggtcgaccagctgccgcccgcgagctccggacttagccggcgtctgcacgtgtcccgggtcgaccagcaggcggccgccggacgctgcggcgcaccgacgcgagggcgctgattcccgttcacgcgcccgcgacctccaccggcctcggcccgccgtggagctgggaccacgcggaactccctctcctacatttttttcagccccaccgcgagtttgcgtccgcgggacttttaagagggagtcactgctgccgtcagccagtaatgcttcctccttttttgcttttaggttttgtcttgcctttttttttttttttttttcttctttctttctttctttctttctttctttctttctttctttctttctttgccgctctcgctctctcgctctctccctctctcgttttctttctctttctctttctctctctctctctctctctctctctgtctctcgctctcgccctctctctctctctctttctctctgtctctctctgtctctctctctctctctctctctctctctctctctctctctctctctctctctccctccccctccctccctctctccccttccttggtgccttctcggctcttgacacttagccgctgtctcgccgtgtcccgggtcgaccggcgggccttctccaccgagcggcgtgtaagagtgcccgtcgggacgagccggacccgccgcgtccccgtctcggtcggcacctccggggtcgaccagctgccgcccgcgagctccggacttagctggcgtctgcacgtgtcccgggtcgaccagcaggcggccgccggacgctgcggcgcaccgacgcgagggcgtcgattccggttcacgcgccggcgacctccaccggcctcggcccgcggtggagctgggaccacgcggaactccctcttctacatttttttcagccccaccgcgagtttgcgtccgcgggacttttaagagggagtcactgctgccgtcagccagtaatgcttcctccttttttgcttttaggttttgtcttgccttttttttttttttttttttttctttctttctttctttctttctttctttctttctttctttctttctttctcgctctcgctctctcgctctctccctcgctcgttttctttctctttctctttctctctctctctctctctctctctctgtctctcgctctcgccctctctctctctctctttctctctgtctctctctgtctctctctctctctctctctctctctctctctctctctctctctctctctctccctccccctccctccctctctccccttccttggtgccttctcggctcttgacacttagccgctgtctcgccgtgtcccgggtcgaccggcgggccttctccaccgagcggcgtgtaagagtgcccgtcgggacgagccggacccgccgcgtccccgtctcggtcggcacctccggggtcgaccagctgccgcccgcgagctccggacttagctggcgtctgcacgtgtcccgggtcgaccagcaggcggccgccggacgctgcggcgcaccgacgcgagggcgtcgattccggttcacgcgccggcgacctccaccggcctcggcccgcggtggagctgggaccacgcggaactccctcttctacatttttttcagccccactgcgagtttgcgtccgcgggacttttaagagggagtcactgctgccgtcagccagtaatgcttcctccttttttgctttttggttttgccttgcgttttctttctttctttctttctttctttctttctttcttttctttctttctttctttctttctttctttctctctctctctctctctctctgtctctctcccctccctccctccttggtgccttctcggctcgctgctgctgctgcctctgcctccacggttcaagcaaacagcaagttttctatttcgagtaaagacgtaatttcaccattttggccgggctggtctcgaactcccgacctagtgatccgcccgcctcggcctcccaaagactgctgggagtacagatgtgagccaccatgcccggccgattccttccttttttcaatcttattttctgaacgctgccgtgtatgaacatacatctacacatacacacacacacacacacacacacacacacacacacacacacacacacacacacaccccccgtagtgataaaactatgtaaatgatatttccataattaatacgtttatattatgttacttttaatggatgaatatgtatcgaagccccatttcatttacatacacgtgtatgtatatccttcctcccttccttcattcattatttattaataattttcgtttatttattttcttttcttttggggccggcccgcctggtcttctgtctctgcgctctggtgacctcagcctcccaaatagctgggactacagggatctcttaagcccgggagggagaggttaacgtgggctgtgatcgcacacttccactccagcttacgtgggctgcggtggggtggggtgcagagaaaacgattgattgcgatctcaattgccttttagcttcattcataccctgttatttgctcgtttattctcatgggttcttctgtgtcattgtcacgttcatcgtttgcttgcctgcttgcctgtttatttccttccttccttccttccttccttccttccttccttccctccttccttccttccttccctcccttactggcagggtcttcctctgtctctgccgcccaggatcaccccaacctcaacgctttggaccgaccaaacggtcgttctgcctctgatccctcccatccccattacctgagactacaggcgcgcaccaccacaccggctgacttttatgttgtttctcatgttttccgtaggtaggtatgtgtgtgtgtgtgtgtgtgtgtgtgtgtgtgtgtgtgtgtgtgtgtgtgtgtatctatgtatgtacgtatgtatgtatgtatgtgagtgagatgggtttcggggttctatcatgttgcccacgctggtctcgaactcctgtcctcaagcaatccgcctgcctgcctcggccgcccacactgctgctattacaggcgtgagacgctgcgcctggctccttctacatttgcctgcctgcctgcctgcctgcctgcctgcctgcctgcctgcctgcctgcctgcctatcaatcgtcttctttttagtacggatgtgctctcgctttattgtccatgctctgggcacacgtggtctcttttcaaacttctatgattattattattgtaggcgtcatctcacgtgtcgaggtgatctcgaacttttaggctccagagatcctcccgcatcggcctcccggagtgctgtgatgacacgcgtgggcacggtacgctctggtcgtgtttgtcgtgggtcggttctttccgtttttaatacggggactgcgaacgaagaaaatttccagacgcatctcaccgatccgccttttcgttctttctttttattctctttagacggagtttcactcttgtcgcccagggtggagtacgatggcggctctcggctcaccgcaccctccgcctcccaggttcaagtgattctcctgcctcagccttcccgagtagctggaatgacagagatgagccatcgtgcccggctaatttttctatttttactacagatggggtttctccatcttggtcaggctggtcttcaacttccgaccgttggagaatcttaactttcttggtggtggttgttttcctttttcttttttttcttttcttttctttccttctcctccccccccacccccccttgtcgtcgtcctcctcctcctcctcctcctcctcctcctcctcctcctcctcctcctctttcatttctttcagctgggctctcctacgtgtgttgctctgttgctcacgctggtctcaaactcctggccttgacgcttctcccgtcacatccgccgtctggttgttgaaatgagcatctctcgtaaaatggaaaagatgaaagaaataaacacgaagacggaaagcacggtgtgaacgtttctcttgccgtctcccggggtgtaccttggacccggaaacacggagggagcttggctgagtgggttttcggtgccgaaacctcccgagggcctccttccctctcccccttgtccccgcttctcccccagccgaggctcccaccgccgccctggcattttccataggagaggtatgggagaggactgacacgccttccagatctatatcctgccggacgtctctggctcggcgtgccccaccggctacctgccaccttccagggagctctgaggcggatgcgacccccacccccccgtcacgtcccgctaccctcccccggctggcctttgccgggcgaccccaggggaaccgcgttgatgctgccttcggatcctccggcgaagacttccaccggatgccccgggtgggccggttgggatcagactggaccaccccggaccgtgctgttcttgggggtgggttgacgtacagggtggactggcagccccagcattgtaaagggtgcgtgggtatggaaatgtcacctaggatgccctccttcccttcggtctgccttcagctgcctcaggcgtgaagacaacttcccatcggaacctcttctcttccctttctccagcacacagatgagacgcacgagagggagaaacagctcaatagataccgctgaccttcatttgtggaatcctcagtcatcgacacacaagacaggtgactaggcagggacacagatcaaacactatttccgggtcctcgtggtgggattggtctctctctctctctctctctctctctctctctctctctctctcgcacgcgcacgcgcgcacacacacacacaatttccatatctagttcacagagcacactcacttccccttttcacagtacgcaggctgagtaaaacccgccccaccctccacccgttggctgacgaaaccccttctctacaattgatgaaaaagatgatctgggccgggcacgctagctcacgcctgtcactccggcactttgggaggccgaggcgggtggatcgcttggggccgggagttcgagaccaggctggccgacgtggcgaaaccccgtctctctgaaaaatagaacgattagccgggcctggtggcgtgggcttggaatcacgaccgctcgggagactggggcgggcgacttgttccaaccggggaggccgaggttgcgatgagctgagatcgtgccgtggcgatgcggcctggatgacggagcgagaccccgtgtcgagagaatcatgatgttattataagatgagttgtgcgcggtgatggccgcctgtagtcgcggctactcgggaggctgagacgaggagaagatcacttgaggccccacaggtcgaggcttcggtcggccgtgacccactgtatcctgggcagtcaccggtcaaggagatatgccccttccccgtttgcttttcttttcttcccttctcttttcttctttttgcttctcttttctttctttctttctttctttctttctttctttctttctttttctttttctctcttcccctctttctttcctgccttcctgcctttcttcttttcttctttcctcccttcctcccttccttctttcctcccgcctcagcctcccaaagtgctgggatgactggcgggaggcaccatgcctgcttggcccaaagagaccctcttggaaagtgagacgcagagagcgccttccagtgatctcattgactgatttagagacggcatctcgctccgtcaccccggcagtggtgccgtcgtaactcactccctgcagcgtggacgctcctggactcgagcgatccttccacctcagcctccagagtacagagcctgggaccgcgggcacgcgccactgtgcccacaccgtttttaattgtttttttttcccccgagacagagtttcactctcgtggcctagactgcagtgcggtggcgcgatcttggctcaccgcaacctctgcctcccggtttcaagcgattctcctgcatcggcctcctgagtagccgggattgcgggcatgcgctgccacgtctggctgatttcgtatttttagtggagacggggcttctccatgtcgatcgggctggtttcgaactcccgacctcaggtgatccgccctccccggcctccggaagtgctgggatgacaggcgtgagccaccgcgcccggccttcatttttaaatgttttcccacagacggggtctcatcatttctttgcaaccctcctgcccggcgtctcaaagtgctggcgtgacgggcgtgagccactgcgcctggactccggggaatgactcacgaccaccatcgctctactgatcctttctttctttctttctttctttctttctttctttctttctttctttctttctttctttcttgatgaattatcttatgatttatttgtgtacttattttcagacggagtctcgctctgggcggggcgaggcgaggcgaggcacagcgcatcgctttggaagccgcggcaacgcctttcaaagccccattcgtatgcacagagccttattcccttcctggagttggagctgatgccttccgtagccttgggcttctctccattcggaagctttgacaggcgcaaccccacccagaggctggctgcggctgaggattagggggtgtgttggggctgaaaactgggtcccctatttttgatacctcagccgacacatcccccgaccgccatcgcttgctcgccctctgagatcccccgcctccaccgccttgcaggctcacctcttactttcatttcttcctttcttgcgtttgaggagggggtgcgggaatgagggtgtgtgtggggagggggtgcggggtggggacggaggggagcgtcctaagggtcgatttagtgtcatgcctctttcaccaccaccaccaccaccgaagatgacagcaaggatcggctaaataccgcgtgttctcatctagaagtgggaacttacagatgacagttcttgcatgggcagaacgagggggaccggggacgcggaagcctgcttgagggaggaggggtggaaggagagacagcttcaggaagaaaacaaaacacgaatactgtcggacacagcactgactacccgggtgatgaaatcatctgcacactgaacacccccgtcacaagtttacctatgtcacagtcttgcacatgtatgcttgaacgacaaataaaagttaggggggagaagagaggagagagagagagagagagagacagagagagacagagagagagagagaggagggagagagaaaacgaaacaccacctccttgacctgagtcagggggtttctggccttttgggagaacgttcagcgacaatgcagtatttgggcccgttctttttttttcttcttcttttctttctttttttttggactgagtctctctcgctctgtcacccaggctgcggtgcggtggcgctctctcggctcactgaaacctctgcttcccgggttccagtgattcttcttcggtagctgggattacaggcgcacaccatgacggccggctcatattcctattttcagtagagacggggtttctccacgttggccacgctggtctcgaactcctgacctcaaatgatccgccttcctgggcctcccaaagtgctggaaacgacaggcctgagccgccgggatttcagcctttaaaagcgcgggccctgccacctttcgctgtggcccttacgctcagaatgacgtgtcctctctgccgtaggttgactccttgagtcccctaggccattgcactgtagcctgggcagcaagagccaaactccgtccccccacctccccgcgcacataataactaactaacaaactaactaactaactaaactaactaaataaataaaatctctacacgtcacctctaagtgtgtgttcccgtgaggagtgatttctaagaaatggcactgtacactgaacgcagtggctcacgtctgtcatcccgaggtcaggagttcgagaccagcccggccaacgtggtgaaacccccgtctctactgaaaatacgaaatggagtcaggcgccgtggggcaggcacctgtaaccccagctactcgggaggctggggtggaagaattgcttgaacctggcaggcggaggctgcagtgacccaagatcgcaccactgcactacagcctgggcgacagagtgagacccggtctccagataaatacgtacataaataaatacacacatacatacatacatacatacatacatacatacatacatacatccatgcatacagatatacaagaaagaaaaaaagaaaagaaaagaaagagaaaatgaaagaaaaggcactgtattgctactgggctagggccttctctctgtctgtttctctctgttcgtctctgtctttctctctgtgtctctttctctgtctgtctgtctctttctttctctctgtctctgtctctgtctttgtctctctctctccctctctgcctgtctcactgtgtctgtcttctgtcttactctctttctctccccgtctgtctctctctctctctctccctccctgtttgtttctctctctccctccctgtctgtttctctctctctctttctgtctgtttctgtctctctctgtctgtctatgtctttctctgtctgtctctttctctgtctgtctgcctctctctttctttttctgtgtctctctgtcggtctctctctctctgtctgtctgtctgtctctctctctctctctctgtgcctatcttctgtcttactctctttctctgcctgtctgtctgtctctccctccctttctgtttctctctctctctctctctctctccccctctccctgtctgtttctctccgtctctctctctttctgtctgtttctcactgtctctctctctccctctctcgctctctctgtctttctctctttctctctgtttctctgtctctctctgtccgtctctgtctttttctgtctgtctctctctttctttctgtctgtctctgtctctgtctctctctctctctctgcttgtctctctcactgtgtctgtcctctgtcttactctccttctctgcctgtccgtctgtctgtctgtctctctctctctccctccctttctgtttctctctcgctctctctctctctctctctctctctctctgcctgtttctctttctctctctgtctgtctctgtctttctctgtctgtctctttctctgtctgtctgtctccttctctctgtctccgtctctgtctctctctctctgtctctctctctctgcctgtctcactgtgtctgtcttctgtcttattctctttctctgtctgtctgtctctctctctcccttcctgtctctttctctctctctctctctttctgtctgtttctctctgcctgtctccgtctttctctgtctgcctctctctttctttttctgcgtctctctgtctctctctctctgtgcctatcttctgtcttactctgtttctctgcctgcctgtctgtctgtctgtctctctctctctctgtctctctctctttctgtctgtttctctctgtctctctgtccatctcggtctttctctgtccgtctctctctttctcccggtctctgtctctgcctctgcctctctctctctcggtctctctctttctatcggtttctctcggtctctcggtccatctcggtctttctcggtcggtctctctctttctcccggtctcggtctcggcctctctctctctctctcgtcgtctttcaggactgtgtgtgtgtctctgtctctgcctctctctctctctctctctctgtctgtctctctcactgtgtgtgtctgtcttctgtcttactctccttctctgcctgtccgtctgtctgtctgtctctccctctctctccctccctttctgtttctctctctctctctctctctttctgtctgtttctctctttctctctctgtctgtctctttctctgtctgtctgtctctctctttctttttctctgtctctctgtctctctctgtgcctgtctctctgtctgtgcctatcttctgtcttactctctttctctggctgactgcctgtctctctctctctctctctctctctctctctctgcctgtctccgtccctccctccctgtctgtctgtttctctctctgtccatttctgtctgtctctttctctttctctctctttctttctctctgtctctctctgtctctctctgtctctctctctctctctctctctctctctctctctctctctctctgcctttctctctcactgtgtcggtcttctgtcttactctctttctctgcctgcctctctgtctgtctgtctgtctctctccctccatgtctctctctctctctctctcactcactgtctctccgtctctctctctttctgtctgtttctctctgtctctgtctttctgtgtgtctgtctgtctctctctctatttgtctttctccctccctgtctgtttctctctctctctctctctctctctctctccctgtctgtctgtttctctctatctctcgctgtccatctctgtctttctatgtctgtctctttctctgtcagtctgtcagacacccccgtgccgggtagggccctgccccttccacgaaagtgagaagcgcgtgcttcggtgcttagagaggccgagaggaatctagacaggcgggccttgctgggcttccccactcggtgtatgatttcgggaggtcgaggccgggtccccgcttggatgcgaggggcattttcagacttttctctcggtcacgtgtggcgtccgtacttctcctatttccccgataagctcctcgacttcaacataaacggcgtcctaagggtcgatttagtgtcatgcctctttcaccgccaccaccgaagatgaaagcaaagatcggctaaataccgcgtgttctcatctagaagtgggaacttacagatgacagttcttgcatgggcagaacgagggggaccggggacgcggaagcctgcttgagggaggaggggtggaaggagagacagcttcaggaagaaaacaaaacacgaatactgtcggacacagcactgactacccgggtgatgaaatcatctgcacactgaacacccccgtcacaagtttacctatgtcacagtcttgctcatgtatgcttgaacgacaaataaaagttcgggggggagaagagaggagagagagagagagacggggagagaggggggagagggggggggagagagagagagagagagagagagagagagagagagagagagagagaaagagaagtaaaaccaaccaccacctccttgacctgagtcagggggtttctggccttttgggagaacgttcagcgacaatgcagtatttgggcccgttctttttttcttcttcttcttttctttctttttttttggactgagtctctctcgctctgtcacccaggctgcggtgcggtggcgctctctcggctcactgaaacctctgcttcccgggttccagtgattcttcttcggtagctgggattacaggtgcgcaccatgacggccggctcatcgttctatttttagtagagacggggtttctccacgttggccacgctggtctcgaactcctgaccacaaatgatccaccttcctgggcctcccaaagtgctggaaacgacaggcctgagccgccgggatttcagcctttaaaagcgcgggccctgccacctttcgctgcggcccttacgctcagaatgacgtgtcctctctgccataggttgactccttgagtcccctaggccattgcactgtagcctgggcagcaagagccaaactccgtccccccacctccccgcgcacataataactaactaactaactaactaactaaaatctctacacgtcacccataagtgtgtgttcccgtgaggagtgatttctaagaaatggtactgtacactgaacgcagtggctcacgtctgtcatcccgaggtcaggagttcgagaccagcccggccaacgtggtgaaacccccgtctctactgaaaatacgaaatggagtcaggcgccgtggggcaggcacctgtaaccccagctactcgggaggctggggtggaagaattgcttgaacctggcaggcggaggctgcagtgacccaagatcgcaccactgcactacagcctgggcgacagagtgagacccggtctccagataaatacgtacataaataaatacacacatacatacatacatacatacatacatacatacatacatacagatatacaagaaagaaaaaaagaaaagaaaagaaagagaaaatgaaagaaaaggcactgtattgctactgggctagggccttctctctgtctgtttctctctgttcgtctctgtctttctctctgtgtctctttctctgtctgtctgtctgtctgtctgtctctttctttctttctgtctctgtctttgtccctctctctccctctctgcctgtctcactgtgtctgtcttctatcttactctctttctctccccgtctgtctctctctcactccctccctgtctgtttctctctctctctctttctgtctgtttctgtctctctctgtctgcctctctctttctctatctgtctctttctctgtctgtctgcccctctctttctttttctgtgtctctctgtctgtctctctctctctctgtgcctatcttctgtcttactctctttctctgcctgtctgtctgtctctctctgtctctccctccctttctgcttctctctctctctctctctctcccccctccctgtctgtttctctctgtctccctctctttctgtctgtttctcactgtctctctctgtctgtctgtttcattctctctgtctctgtctctgtctctctctctctctgtctctccctctctgtgtgtatcttttgtcttactctccttctctgcctgtccgtctgtctgtctgtctctctctctccctgtccctctctctttctgtctgtttctctctctctctctctctctctctctctgtctctgtctttctctgtctgtccctttctctgtctgtctgcctctctctttctctttctgtgtctctctgtctctctctctgtgcctatcttctgtcttactctctttctctgcctgtctatctgtctgtctctctctgtctctctccctgcctttctgtttctctctctctccctctctcgctctctctgtctttctctctttctctctgtttctctgtctctctctgtccgtctctgtctttttctgtctgtctgtctctctctttctttctgtcgtctgtctctgtctctgtctctgtctctctctctctctctctccttgtctctctcactgtgtctgtcttctgtcttactctccttctctgcctgtccatctgtctgtctgtctctctctctctctccctacctttctgtttctctctcgctagctctctctctctctgcctgtttctctctttctctctctgtctttctctgtctgtctctttctctgtctgtctgtctctttctctctgtctctgtctctgtctctctctctctctctctctctctgcctctctcactgtgtctgtcttctgtcttattctctttctctctctgtctctctctctctctcctttcctgtctgtttttctctctctctctctctttctgcctgtttctctctgtctgtctctgtctttctctgtctgtctgcctctctctttctttttctgcgtctctctgtctctctctctctctctctgttcctatcttctgtcttactctgtttccttgcctgcctgcctgtctgtgtgtctgtctctctctctctctctctctctctctctccctccctttctctttctctgtctctctctctctttctgggtgtttctctctgtctctctgtccatctctgtctttctatgtctgtctctctctttctctctgtctctgtctctgcctctctctctctctctctctctctctctctctctctctgtctgtctctctcactgtgtgtgtctgtcttctgtcttactctccttctctgcctgtccgtctgtctgtctgtctctccctctctctccctccctttctgtttctctctctctcctgtctgtctgtttctctctctgcctctctctctctctgtctgtctctttctctgtctgtctgtctctctctttctttttctctgtctctctgtctctctctgtgtctgtctctctttctgtgcctatcttctgtcttactctctttctctggctgtctgcctgtctctctctctctgcctgtctccgtccctccctccctgtctgtctgtttctctctctgtctctgtctctctgtccatctctgtctgtctctttctctttctctctctctgtctctgtctctctctctctctgcctgtctctctcactgtgtctgtcttctgtcttactctctttctctgcctgcctctctgtctgtctgtctctctccctccatgtctctctctctctctcactcactctctctccgtctctctctctttctgtctgtttctctctctgtctgtctctctccctccatgtctctctctctctctctcactcactctctctccgtctctctctctctttctgtctgtttctctctctgtctgtctctctccctccatgtctctctctctccctctcactcactctctctccgtctctctctctctttctgtctgtttctctgtctgtctgtctgtctgtctgtctctctctctctctctctctctctctgtttgtctttctccctccctgtctgtctgtctgtctctctctctctgtctctgtctctgtctctctctctttctctttctgtctgtttctctctatctctcgctgtccatctctgtctttctatgtctgtctctttctctgtcagtctgtcagacacccccgtgccgggtagggccctgccccttccacgagagtgagaagcgcgtgcttcggtgcttagagaggccgagaggaatctagacaggcgggccttgctgggcttccccactcggtgtacgatttcgggaggtcgaggccgggtccccgcttggatgcgaggggcattttcagacttttctctcggtcacgtgtggcgtccgtacttctcctatttccccgataagctcctcgacttcaacataaactgttaaggccggacgcaacacggcgaaaccccgtctctactaaaaatacaaagctgagtcgggagcggtggggcaggcccctgtaatgccagctcctcgggaggctgaggcgggagaatcgcttgaaccagggaagcggaggctgcagggagccgagatcgcgccactgcactacggcccaggctgtagagtgagtgagactcggtctctaaataaatacggaaattaattaattcattaattcttttccctgctgacggacatttgcaggcaggcatcggttgtcttcgggcatcacctagcggccactgttattgaaagtcgacgtgacacggagggaggtctcgccgacttcaccgagcctggggcaacgggtttctctctctcccttctggaggcccctccctctctccctcgttgcctagggaacctcgcctagggaacctccgccctggcgggggccctattgttctttgatcggcgctttacttttctttgtgttttggcgcctagactcttctacttgggctttgggaagggtcagtttaattttcaagttgccccccggctccccccactacccacgtcccttcaccttaatttagtgagtcggttaggtgggtttcccccaaaccgccccccccccccccgcctcccaacaccctgcttggaaaccttccagagccaccccggtgtgcctccgtcttctctccccttcccccaccccttgccggcgatctcattcttgccaggctgacatttgcatcggtgggcgtcaggcctcactcgggggccaccgtttttgaagatgggggcggcacggtcccacttccccggaggcagcttgggccgatggcatagccccttgacccgcgtgggcaagcgggcgggtctgcagttgtgaggcttttccccccgctgcttcccgcctcaggcctccctccctaggaaagcttcaccctggctgggtctcggtcaccttttatcacgatgttttagtttctccgccctccggccagcagagtttcacaatgcgaagggcgccacggctctagtctgggccttctcagtacttgcccaaaatagaaacgctttctgaaaactaataactttgctcacttaagatttccagggacggcgccttggcccgtgtttgttggcttgttttgtttcgttctgttttgttttgttcgtgtttttcctttctcgtatgtctttcttttcaggtgaagtagaaatccccagttttcaggaagacgtctattttccccaagacacgttagctgccgttttttcctgttgtgaactagcgcttttgtgactctctcaacgtgcagtgagagccggttgatgtttactatccttcatcatgacatcttattttctagaaatccgtaggcgaatgctgctgctgctcttgttgctgttgttgttgttgttgttgtcgtcgttgctgttgtcgttgtcgttgttgttgtcgttgtcgttgttttcaaagtataccccggccaccgtttatgggatcaaaagcattataaaatatgtgtgattatttcttgagcacgcccttcctccccctctctctgtctctctgtctgtctctgtctctctctttctctgtctgtcttctctctctctctctctctgtgtctctctctctctgcctgtctgtttctctctctctgcctctctctctctctctctctctgcctgtctctctcactgtgtctgtcttctgtcttactccctttctctgtctgtctgtcggtctctctctctctctctccctgtctgtatgtttctctctgtctctgtctctctctctctttctgtttctctctctccgtctctgtctttctctgactgtctctctctttccttctctctgtctctctctgcctgtctctctcactctgtcttctgtcttactctctctctctgcctgcctgtctctctcactctctctctctgtgtgtctctctctctctttctgtttctctctgtctctctgtccgtctctgtctttctctgtctgtctctttgtctgtctgtctttgtctttccttctctctgtctctgtctctctcactgtgtctgtcttctgtcttagtctctctctctctctctccctgtctgtctgtctctctctctctctccccctgtctgtttctctctctctctctctctctgtctttgtctttctttctgtctctgtctctctctctctctctgtgtgtctgtcttctgtcttactgtctttctctgcctgtctgtctgtctgtctctctctgtctgtctctctctctctctcccccctgtcggctgtttctctgtctctgtctgtgtctctctttctgtctgtttctctctgtctgtctttctctctctgtctctttctctctgtctctctgtctgtctctgtctctctctctgtctctctctctctgtgggggtgtgtgtgtgtgtgtgtatgtgtgtgtgtgtgtgtgtgtgtgtctgccttctgtcttactctctttctctgcctgtctgtctgcctgtctgtttgtctctctctctctgcctgtctctctcccttcctgtctgtttctctctctttctgtttctctctgtctctgtccatctctgtctttctccgtctgtctctttatctgtctctctccgtctgtctctttatctgtctctctctctctttctgtctttctctctctgtgtatcgttgtctctctctgtctgtctctgtctctgtctctctgtctctctctctctctctctctctctgtctgtctgtccgtctgtctgtctcggtctctggctctcgctatcccccgccctctctttttttgcaaaagaagctcaagtacatctaatctaatcccttaccaaggcctgaattcttcacttctgacatcccagatttgatctccctacagaatgctgtacagaactggcgagttgatttctggacttggatacctcatagaaactacatatgaataaagatccaatcctaaaatctggggtggcttctccctcgactgtctcgaaaaatcgtacctctgttcccctaggatgccggaagagttttctcaatgtgcatctgcccgtgtcctaagtgatctgtgaccgagccctgtccgtcctgtctcaaatatgtacgtgcaaacacttctctccatttccacaactacccacggccccttgtggaaccactggctctttgaaaaaaatcccagaagtggttttggctttttggctaggaggcctaagcctgctgagaactttcctgcccaggatcctgtgtgaccaaaagtgcctctgctgggagctgggatcctcgggaccatgcttgctagcgctggatgagtctctggaaggacgcacgggactccgcaaagctgacctgtcccaccgaggtcaaatggatacctctgcattggcccgaggcctccgaagtacatcaccgtcaccaaccgtcaccgtcagcatccttgtgagcctgcccaaggccccgcctccggggagactcttgggagcccggccttcgtcggctaaagtccaaagggatggtgacttccacccacaaggtccccactgaacggcgaagatgtggagcgtaggtcagagaggggaccaggaggggagacgtcccgacaggcgacgagttcccaaggctctggccaccccacccacgccccacgccccacgtcccgggcacccgcgggacaccgccgctttatcccctcctctgtccacagccggccccaccccaccacgcaacccacgcacacacgctggaggttccaaaaccacacggtgtgactagagcctgacggagcgagagcccatttcacgaggtgggaggggtgggggtggggtgggttgggggttgtggggtctgtggcgagcccgattctccctcttgggtggctacaggctagaaatgaatatcgcttcttgggcggaggggcttccttaggccatcaccgcttgcgggactacctctcaaaccctcccttgaggccacaaaatagattccaccccacccatcgacgtttcccccgggtgctggatgtatcctgtcaagagacctgagcctgacaccgtcgaattaaacaccttgactggctttgtgtgtttgtttgtttctgagatggagtcttgctctgtcccccaggctggagtgcagtggcgtgatttcagctcactggaacctttgcctcctgggttcaagtgattttcctgtttcagcgccaccatggccggctcatttttttttttttttttttttttttttttttttttttttttttggtagacacggggtttcaccctctttcattggttttcactggagattctagattcgagccacacctcattccgtgccacagagagacttctttttttttttttttttaagcgcaacgcaacatgtctgccttatttgagtggcttcctatatcattataattgtgttatagatgaagaaacggtattaaacactgtgctaatgatagtgaaagtgaagacaaaagaaaggctatctattttgtggttagaataaagttgctcagtatttagagctacctaaatacgtcagcatttacactcttcctagtaaaagctggccaatctgaataatcctcctttaaacaaacacaatttttgatagggttaagatttttttaagaatgcgactcctgcaaaatagctgaacagacgatacacatttaaaaaaataacaacacaaggatcaaccagacttgggaaaaaatcgaaaaccacacaagtcttatgaagaactgagttcttaaaataggacggagaacgtagctatcggaagagaaggcagtattggcaagttgattgttacgttggtcagcagtagctggcactatctttttggccatctttcgggcaatgtaactactacagcaaaatgagatatgatccattaaacaacatattcgcaaatcaaaaagtgtttcagtaatataatgcttcagatttagaagcaaatcaaatgatagaactccactgctgtaataagtcaccccaaagatcaccgtatctgacaaaataactaccacagggttatgacttcagaatcatactttctcttgatatttacttatgtatgtatttattttttttaatttatttctcttgagacggcgtctcgctctgtcgcccaggctggagtgcgatggtgtgatctcggctcactgcaaccgccacctccctgggttcaagcgattctcctgcctcagcctcccgagtagctgggactacaggtgcccgccaccacgcccagctaatctttatacttttaatagagacggggtttcaccgtgtcggcccggatggtctcgatctcttgacctcgtgacccgcccgcctcggcctcccaaagtgctgggatgacaggcgtgagccactgagcccggccttctcttgacgtttaaactatgaagtcagtccagagaaacgcaataaatgtcaacggtgaggatggtgttgaggcagaagtaggaccacactttttcctatcttattcagttgataacaatatgacctaggtagtaatttcctatgtgcctacttatacacgagtacaaaagagtaaaacagagagactgctaaattaaagggtacgtgaagttcttcatagtaactccgtaaactggaacactgtcaaaaagcagcagctagtgaattgtttccatgtatttttctattatccaataagtgaactatgctattcctttccagtctcccaagcacttcttgtccccatcaccacttcggtgctcgaagaaaaagtaacaaatcaaggaacacaactaaagaaacacacacacaaaccaaagacaactacagcgtctgcaaaagtttgctagaagactgaaactgttgagtataaggatctggtattctacgatcatgagttcacttcagagtttgttcaagacatacgtttcgtaaggaaacatcttagttagaagttattcagcagtaggtaccatccctaagtatttttcaccaaattcgtgacaataaagagctatctaaccagaaaaattagcgagtaccggcaccatccatagggctttgtctttacgcttcattagcacttaccatgccttacaatgtctaggattgaccctgatagcatttcgaaaacaagctaatgctttgtccagttcttcagtgaagacaagctcacgccctaatgcgctataggcataagcatcatttggatccacttcgagagttctctggaagaattgaatcgcaatatcgtgttcccgttgcagaccgaaacagttccctgcagcacaccaggcctctggctggcgaatttttatccatgtctgtgaagtctttggacagaactgaaagagcaacctctttcggaggatgccaaagtgttgtagagtagatctccatgccttcgactctgtaattctcaatcctcctaacctctgagaattgtctttcagcttgcgtggactctgaaagtttacaataggcccttccgatttggcacagtacccaaccggtattgcagtggtgagaagctagatggctcaagatgctgatagcttctttgccgtggtaagaacacaaagctaaataacctttccccctttcacgaagaaggctcatcaagccttccgctgctgctttttgtagattaaaagcctgaatctgaggcgcgattgtggctattttcccttctgaaatgacggaagagtccaattttgtcacttccaggctatcacttatgttcggtggagttattgctcctttattagttttacttttggttcttctgtttgggattttaggtggaaacttcatttttaattttctcctattctcctcggttgtggagctgtcactagtcaagagtcgtgaatttcttcgaggcggtgcatttgggggagatgccatagtggggctcaatacctgaggtgttgcccttgtcggcggaccagaactttgtgtttttgcaaggactggagttacctttcggctctttcccctctgcgagaagacagacggtgttccggtttggccgattctggcaacaggcttttttgaaggggctccggtggatggcacgtcaatgacagacggtgtctcataccagtgcagttttgtcaatagggtccgtctccgggacttggggtttctaatggcaaaatgccaacacttggggttaatggactaacagctgctggtcctcctaataaacttcgaccagtttttggtttatgttgaacctgtttagatcatatggaagttcctgttcccagtgggacagtatcaggtgaaaggacagctgaatcgatagaagacactggggagtctgtattcaaggagtactttgaattggaagattctaaattccatccgtttcattcgacggtgtcctggggtgtttccgtaagaacggtctcgggctgtctgtgacataaactaggacgaggtccaagtgttgtggcgcaacacttggacaggcagttgctaaagctctctagagaggtgaatcaaaatgtttggtcaggatctggcttttcccccctatttcacatcatgattcaaagggacaccagaggaaaggatttcaacgaaggctcttttggtcacattctgatcctttggtaagccgatctgtcttgcaatatacatgtcccgacgatggaaggggaaagcgagctgaatcaccaaactcaggaacgataatatcatcgtggcttttctgcttatgaaacactccacccgataagatttgatccccttctgcaagcttgctgagatcaacacaacatttcgcaagcaggcatttgcattgcggggtagtacaactgtgtcctttcaagagtctatatgttttataggcctttcctgagcggtaagaacaggtcgccagtaagaacaaggcttcttctgagtgtacttctgcataaaggcgttctgcgggggaaaccgcatctcggtaggcatagtggtttagtgcttgccatatagcagcctggacgggtccctgcagcaccgccatcctcgaggctcaggcccactttctgcagtgccacaggcaccccccccccccccatagcggctccggcccggccagcctcggctcatttaaaggcaccagccgccgttaccgggggatgggggagtccgagacagaatgacttctttatcctgctgactctggaaagcccggcgccttgtgatccattgcaaaccgagagtcacctcgtgtttagaacacggatccactcccaagttcagtggggggatgtgaggggtgtggcaggtaggacgaaggactctcttccttctgattcggtctgcacagtggggcctagggctggagctctctccgtgcggaccgctgactccctctaccttgggttccctcggccccaccctggaacgccgggccttggcagattctggcccttcctggcccttcagtcgctgtcagaaaccccatctcatgctcggatgccccgagtgactgtggctcgcacctctccggaaacattggaaatctctcctctacgcgcggccacctgaaaccacaggagctcgggacacacgtgctttcgggagagaatgctgagagtctcttgccgactctctcttgacttgagttcttcgtgggtgcgtggttaagacgtagtgagaccagatgtattaactcaggccgggtgctggtggctcacgcctgtaaccccaacactttgggaggccgaggccgtaggatccctcgaggaatcgcctaaccctggggaggttgaggttgcagtgagtgagccatagttgtgtcactgtgctccagtctgggcgaaagacagaatgaggccctgccacaggcaggcaggcaggcaggcaggcagaaagacaacagctgtattatgttcttctcagggtaggaagcaaaaataacagaatacagcacttaattaatttttttttttcccttcggacggagtttcactcttggtgcccacgctggagtgcagtggcaccatctcggctcaccgcaacctccacctcccgcgttcaagcgattctcctgcctcagcctcctgagtagctgggattacagggaggagccaccacacccagctgattttgtattgttagtagagacggcatttctccatgtgggtcaggctggtctcgaactggcgaccccagtggatctgcccgccccggcctcccaaagtgctggggtgacaggcgtgagccatcgtgactggccggctacgtttatttatttatttttttaattattttacttttttttagttttccattttaatctatttatttatttacatttatttatttatttatttatttacttatttatttattttcgagacagactctcgctctgctgcccaggctggagtgcagcggcgtgatctcggctcactgcaagctccgcctcccgggttcacgccattctcctgcctcagcctcccaagtagctgggactacaggcgcccgccaccgtgcccggctaactttttgtattttgagtagagatggggtttcactgtggtagccaggatggtctcgatctcctgaccccgtgatccgtccacctcggcctcccaaagtgctgggatgacaggcgtgagccaccgcccccggcctatttatctatttattaactttgagtccaggttatgaaaccagttagtttttgtaattttttttttttttttttttttttgagacgaggtttcaccgtgttgccaaggcttggaccgagggatccaccggccctcggcctcccaaaagtgcggggatgacaggcgcgagcctaccgcgcccggaccccccctttccccttcccccgcttgtcttcccgacagacagtttcacggcagagcgtttggctggcgtgcttaaactcattctaaatagaaatttgggacgtcagcttctggcctcacggactctgagccgaggagtcccctggtctgtctatcacaggaccgtacacgtaaggaggagaaaaatcgtaacgttcaaagtcagtcattttgtgatacagaaatacacggattcacccaaaacacagaaagcagtcttttagaaatggccttagccctggtgtccgtgccagtgattcttttcggtttggaccttgactgagaggattcccagtcggtctctcgtctctggacggaagttccagatgatccgatgggtgggggacttaggctgcgtccccccaggagccctggtcgattagttgtggggatcgccttggagggcgcggtgacccactgtgctgtgggagcctccatccttccccccaccccctccccaggggatcccaattcattccgggctgacacgctcactggcaggcgtcgggcatcacctagcggtcactgttactctgaaaacggaggcctcacagaggaagggagcaccaggccgcctgcgcacagcctggggcaactgtgtcttctccaccgcccccgcccccacctccaagttcctccctcccttgttgcctaggaaatcgccactttgacgaccgggtctgattgacctttgatcaggcaaaaacgaacaaacagataaataaataaaataacacaaaagtaactaactaaataaaataagtcaatacaacccattacaatacaataagatacgatacgataggatgcgataggatacgataggatacaatacaatacgatacgatacaatacaatacaatacaatacaatacaatacaatacaatacaatacaatacgccgggcgcggtggctcatgcctgtcatcccgtcactttgggatgccgaggtggacgcatcacctgaagtcgggagttggagacaagcccgaccaacatggagaaatcccgtctcaattgaaaatacaaaactagccgggcgcggtggcacatgcctataatcccagctgctaggaaggctgaggcaggagaatcgcttgaacctgggaagcggaggttgcagtgagccgagattgcgccatcgcactccagtctgagcaacaagagcgaaactccgtctcaaaaataaatacataaataaatacatacatacatacatacatacatacatacataaattaaaataaataaataaaataaaataaataaatgggccctgcgcggtggctcaagcctgtcatcccctcactttgggaggccaaggccggtggatcaagaggcggtcagaccaacagggccagtatggtgaaaccccgtctctactcacaatacacaacattagccgggcgctgtgctgtgctgtactgtctgtaatcccagctactcgggaggccgagctgaggcaggagaatcgcttgaacctgggaggcggaggttgcagtgagccgagatcgcgccactgcaacccagcctgggcgacagagcgagactccgtctccaaaaaatgaaaatgaaaatgaaacgcaacaaaataattaaaaagtgagtttctggggaaaaagaagaaaagaaaaaagaaaaaaacaacaaaacagaacaaccccaccgtgacatacacgtacgcctctcgcctttcgaggcctcaaacacgttaggaattatgcgtgatttctttttttaacttcattttatgttattatcatgattgatgtttcgagacggagtctcggaggcccgccctccctggttgcccagacaaccccgggagacagaccctggctgggcccgattgttcttctccttggtcaggggtttccttgtctttcttcgtgtctttaacccgcgtggactcttccgctcgggtttgacagatggcagctccactttaggccttgttgttgttggggactttcctgattctccccagatgtagtgaaagcaggtagatttgccttgcctggacttgcctggccttgccttttctttctttctttctttattactttctctttttcttcttcttcttcttcttcttcttcttcttcttcttcttcttcttcttctttttttttttgagacagagtttcactcttgttgcccaggctagagggcaatggtgcgatctcggctcaccgcaccctccgcctcccaggttcaagcgattctcctgcctcagcctcctgattagctgggattacaggcatgggccaccgtgcctggctgatgtttgtacttttagtagagacggtgtttttccatgttggtcaggctggtctcccactcccaacctcaggtggtccgcctgccttagcctcccaaagtgctgggatgacaggcgtgagccaccgcgcccagcctctctctctctctctctctctctctctctctctctctctctcgctcgcttgcttgcttgctttcgtgctttcttgctttcccgttttcttgctttctttctttctttcgtttctttcatgcttgctttcttgcttgcttgcttgctttcgtgctttcttgctttcctgttttctttctttctttctttcttttgtttctttcttgcttgctttcttgcttgcttgctttcgtgctttcttgttttctcgatttctttctttcttttgtttctttcctgcttgctttcttgcttgattgctttcgtgctttcttgctttcttgttttctttctttcttttgtttctttctttcttgcttccttgttttcttgctttcttgcttgcttgctttcgtgctttcttgttttcttgctttctttcttttgtttctttcttgcttgctttcttgcttccttgttttcttgctttcttgcttgcttgctttcgtgctttctttcttgctttcttttctttctttcttttctttttctttctttcttgctttcttttctttcattcattcattctttctttctttcctttctttctttctttctttctatctttctttctttctttctttctgtttcgtccttttgagacagagtttcactcttgtttccacggctagagtgcaatggcgcgatcttggctcaccgcaccttccgcctcccgggttcgagcgcttctcctgcctcagcctcccgattagcggggattacagggaggcacccccacgcctggcttggctgatgtttgtgtttttagtaggcacgccgtgtctctccatgttgctcaggctggtctccaactcccgacctcctgtgatgcgcccacctcggcctctcgaagtgctgggatgacgggcgtgagccaccgtgcccggcctgttgactcatttcgcttttttatttctttcgtttccacgcgtttacttatatgtattaatgtaaacgtttctgtacgcttatatgcaaacaacgacaacgtgtatctctgcattgaatactcttgcgtatggtaaatacgtatcggttgtatggaaatagacttctgtatgatagatgtaggtgtctgtgttatacaaataaatacacatcgctctataaagaagggatcgtcgataaagacgtttattttacgtatgaaaagcgtcgtatttatgtgtgtaaatgaacgagcgtacgtagttatctctgttttctttcttcctctccttcgtgtttttcttccttcctttcttcctttctctccttctttaggtttttcttcctctcttcctttccttctttctctctttctgtccttttttccttcgtgctttatttctctttcgttccctgtgtttccttcttttttctttcctctctgtttctttttcccttctttccttcgtttctttcctcattctttctctctttttcgtgtttctttccttcccgtctgtcttttaaaaaatggagtgtttcagaagtttactttgtgtatctacgttttctaaattgtctctcttttctccattgtcttcctccctccctccctccctccctccctgctcccttccctccctccttccctttcgccatctgtctcttttccccactcccctccccccgtctgtctctgcgtggattccggaagagcctacccattctgcctctccgtgtgtctgcagcgacccgcgaccgagtccttgtgtgttctttctccctccctcactccctccctccctccctccctgcttccgagaggcatctccaaacacccacgcgccgtgggttgtcttctgactctgtcgcggtcgaggcagagacgcgttttgggcaccgtttgtgtggggttggggcagaggggctgcgttttcggcctcgggaagagcttctcgactcacggtttcgctttcgcggtccacgggccgccctgccagccggatctgtctcgctgacgtccgcggcggttgtcgggctccatctggcggccgctttgagatcgtgctctcggcttccggagctgcggtggcagctgccgagggaggggaccgtccccgctgtgagctaggcagagctccggaaagcccgcggtcgtcagcccggctggcccggtggcgccagagctgtggcgcgtcgcttgtgagtcacagctctggcgtgcaggtttatgtgggggagaggctgtcgctgcgcttctgggcccgcggcgggcgtggggctgcccgggccggtcgaccagcgcgccgtagctcccgaggcccgagccgcgacccgcggggacccgccgcgcgtggcgcgggaggctggggacgcccttcccggcccggtcgcgggtccgcgctcatcctggccgtctgaggcggcggccgaattcgtttccgagtccccgtggggagccggggaccgtcccgcccccgtcccccgggtgccggggagcggtccccgggccgggccgcggtccctctgccgcgatcctttctggcgagtccccgtgcggagtcggagagcgctccctgagcgcgcgtgcggcccgagaggtcgcgcctggccggccttcggtccctcgtgtgtcccggtcgtaggaggggccggccgaaaatgcttccggctcccgctctggagacacgggccggccccctgcgtgtggcacgggcggccgggagggcgtccccggcccggcgctgctcccgcgtgtgtcctggggttgaccagagggccccgggcgctccgtgtgtggctgcgatggtggcgtttttggggacaggtgtccgtgtcgcgcgtcgcctgggccggcggcgtggtcggtgacgcgacctcccggccccgggggaggtatatctttcgctccgagtcggcattttgggccgccgggttattgctgacacgctgtcctctggcgacctgtcgctggagaggttgggcctccggatgcgcgcggggctctggcctaccggtgacccggctagccggccgcgctcctgcttgagccgcctgccggggcccgcgggcctgctgttctctcgcgcgtccgagcgtcccgactcccggtgccggcccgggtccgggtctctgacccacccgggggcggcggggaaggcggcgagggccaccgtgcccccgtgcgctctccgctgcgggcgcccggggcggccgcgacaaccccaccccgctggctccgtgccgtgcgtgtcaggcgttctcgtctccgcggggttgtccgccgccccttccccggagtggggggttggccggagccgatcggctcgctggccggccggccggcctccgctcccggggggctcttcgtgatcgatgtggtgacgtcgtgctctcccgggccgggtccgagccgcgacgggcgaggggcggacgttcgtggcgaacgggaccgtccttctcgctccgccccgcgggggtcccctcgtctctcctctccccgcccgccggcggtgcgtgtgggaaggcgtggggtgcggaccccggcccgacctcgccgtcccgcccgccgccttctgcgtcgcggggcgggccggcggggtcctctgacgcggcagacagccctcgctgtcgcctccagtggttgtcgacttgcgggcggcccccctccgcggcggtgggggtgccgtcccgccggcccgtcgtgctgccctctcggggggtttgcgcgagcgtcggctccgcctgggcccttgcggtgctcctggagcgctccgggttgtccctcaggtgcccgaggccgaacggtggtgtgtcgttcccgcccccggcgccccctcctccggtcgccgccgcggtgtccgcgcgtgggtcctgagggagctcgtcggtgtggggttcgaggcggtttgagtgagacgagacgagacgcgcccctcccacgcggggaagggcgcccgcctgctctcggtgagcgcacgtcccgtgctcccctctggcgggtgcgcgcgggccgtgtgagcgatcgcggtgggttcgggccggtgtgacgcgtgcgccggccggccgccgaggggctgccgttctgcctccgaccggtcgtgtgtgggttgacttcggaggcgctctgcctcggaaggaaggaggtgggtggacgggggggcctggtggggttgcgcgcacgcgcgcaccggccgggcccccgccctgaacgcgaacgctcgaggtggccgcgcgcaggtgtttcctcgtaccgcagggccccctcccttccccaggcgtccctcggcgcctctgcgggcccgaggaggagcggctggcgggtggggggagtgtgacccaccctcggtgagaaaagccttctctagcgatctgagaggcgtgccttgggggtaccggatcccccgggccgccgcctctgtctctgcctccgttatggtagcgctgccgtagcgacccgctcgcagaggaccctcctccgcttccccctcgacggggttgggggggagaagcgagggttccgccggccaccgcggtggtggccgagtgcggctcgtcgcctactgtggcccgcgcctcccccttccgagtcgggggaggatcccgccgggccgggcccggcgttcccagcgggttgggacgcggcggccggcgggcggtgggtgtgcgcgcccggcgctctgtccggcgcgtgaccccctccgccgcgagtcggctctccgcccgctcccgtgccgagtcgtgaccggtgccgacgaccgcgtttgcgtggcacggggtcgggcccgcctggccctgggaaagcgtcccacggtgggggcgcgccggtctcccggagcgggaccgggtcggaggatggacgagaatcacgagcgacggtggtgcgggcgtgtcgggttcgtggctgcggtcgctccggggcccccggtggcggggccccggggctcgcgaggcggttctcggtgggggccgagggccgtccggcgtcccaggcggggcgccgcgggaccgccctcgtgtctgtggcggtgggatcccgcggccgtgttttcctggtggcccggccgtgcctgaggtttctccccgagccgccgcctctgcgggctcccgggtgcccttgccctcgcggtccccggccctcgcccgtctgtgccctcttccccgcccgccgcccgccgatcctcttcttccccccgagcggctcaccggcttcacgtccgttggtggccccgcctgggaccgaacccggcaccgcctcgtggggcgccgccgccggccactgatcggcccggcgtccgcgtcccccggcgcgcgccttggggaccgggtcggtggcgccccgcgtggggcccggtgggcttcccggagggttccgggggtcggcctgcggcgcgtgcgggggaggagacggttccgggggaccggccgcgactgcggcggcggtggtgggggcagccgcggggatcgccgagggccggtcggccgccccgggtgccgcgcggtgccgccggcggcggtgaggccccgcgcgtgtgtcccggccgcggtcggccgcgctcgaggggtccccgtggcgtccccttccccgccggccgcctttctcgcgccttccccgtcgccccggcctcgcccgtggtctctcgtcttctcccggcccgctcttccgaaccgggtcggcgcgtcccccgggtgcgcctcgcttcccgggcctgccgcggcccttccccgaggcgtccgtcccgggcgtcggcgtcggggagagcccgtcctccccgcgtggcgtcgccccgttcggcgcgcgcgtgcgcccgagcgcggcccggtggtccctgccggacaggcgttcgtgcgacgtgtggcgtgggtcgacctccgccttgccggtcgctcgccctttccccgggtcggggggtggggcccgggccggggcctcggccccggtcgcggtcccccgtcccgggcgggggcgggcgcgccggccggcctcggtcggccctcccttggccgtcgtgtggcgtgtgccacccctgcgcccgcgcccgccggcggggctcggagccgggcttcggccgggccccgggccctcgaccggaccggtgcgcgggcgctgcggccgcacggcgcgactgtccccgggccgggcaccgcggtccgcctctcgctcgccgcccggacgtcggggccgccccgcggggcgggcggagcgccgtccccgcctcgccgccgcccgcgggcgccggccgcgcgcgcgcgcgcgtggccgccggtccctcccggccgccgggcgcgggtcgggccgtccgcctcctcgcgggcgggcgcgacgaagaagcgtcgcgggtctgtggcgcggggccccggtggtcgtgtcgcgtggggggcgggtggttggggcgtccggttcgccgcgccccgccccggccccaccggtcccggccgccgcccccgcgcccgctcgctccctcccgtccgcccgtccgcggcccgtccgtccgtccgtcgtcctcctcgcttgcggggcgccgggcccgtcctcgcgaggccccccggccggccgtccggccgcgtcggggcctcgccgcgctctaccttacctacctggttgatcctgccagtagcatatgcttgtctcaaagattaagccatgcatgtctgagtacgcacggccggtacagtgaaactgcgaatggctcattaaatcagttatggttcctttggtcgctcgctcctctcctacttggataactgtggtaattctagagctaatacatgccgacgggcgctgacccccttcgcgggggggatgcgtgcatttatcagatcaaaaccaacccggtcagcccctctccggccccggccggggggcgggcgccggcggctttggtgactctagataacctcgggccgatcgcacgccccccgtggcggcgacgacccattcgaacgtctgccctatcaactttcgatggtagtcgccgtgcctaccatggtgaccacgggtgacggggaatcagggttcgattccggagagggagcctgagaaacggctaccacatccaaggaaggcagcaggcgcgcaaattacccactcccgacccggggaggtagtgacgaaaaataacaatacaggactctttcgaggccctgtaattggaatgagtccactttaaatcctttaacgaggatccattggagggcaagtctggtgccagcagccgcggtaattccagctccaatagcgtatattaaagttgctgcagttaaaaagctcgtagttggatcttgggagcgggcgggcggtccgccgcgaggcgagccaccgcccgtccccgccccttgcctctcggcgccccctcgatgctcttagctgagtgtcccgcggggcccgaagcgtttactttgaaaaaattagagtgttcaaagcaggcccgagccgcctggataccgcagctaggaataatggaataggaccgcggttctattttgttggttttcggaactgaggccatgattaagagggacggccgggggcattcgtattgcgccgctagaggtgaaattcttggaccggcgcaagacggaccagagcgaaagcatttgccaagaatgttttcattaatcaagaacgaaagtcggaggttcgaagacgatcagataccgtcgtagttccgaccataaacgatgccgaccggcgatgcggcggcgttattcccatgacccgccgggcagcttccgggaaaccaaagtctttgggttccggggggagtatggttgcaaagctgaaacttaaaggaattgacggaagggcaccaccaggagtggagcctgcggcttaatttgactcaacacgggaaacctcacccggcccggacacggacaggattgacagattgatagctctttctcgattccgtgggtggtggtgcatggccgttcttagttggtggagcgatttgtctggttaattccgataacgaacgagactctggcatgctaactagttacgcgacccccgagcggtcggcgtcccccaacttcttagagggacaagtggcgttcagccacccgagattgagcaataacaggtctgtgatgcccttagatgtccggggctgcacgcgcgctacactgactggctcagcgtgtgcctaccctacgccggcaggcgcgggtaacccgttgaaccccattcgtgatggggatcggggattgcaattattccccatgaacgaggaattcccagtaagtgcgggtcataagcttgcgttgattaagtccctgccctttgtacacaccgcccgtcgctactaccgattggatggtttagtgaggccctcggatcggccccgccggggtcggcccacggccctggcggagcgctgagaagacggtcgaacttgactatctagaggaagtaaaagtcgtaacaaggtttccgtaggtgaacctgcggaaggatcattaacggagcccggagggcgaggcccgcggcggcgccgccgccgccgcgcgcttccctccgcacacccacccccccaccgcgacgcggcgcgtgcgcgggcggggcccgcgtgcccgttcgttcgctcgctcgttcgttcgccgcccggccccgccggccgcgagagccggagaactcgggagggagacgggggagagagagagagagagagaaagagaaagaagggcgtgtcgttggtgtgcgcgtgtcgtggggccggcgggcggcggggagcggtccccggccgcggccccgacgacgtgggtgtcggcgggcgcgggggcggttctcggcggcgtcgcggcgggtctgggggggtctcggtgccctcctccccgccggggcccgtcgtccggccccgccgcgccggctccccgtcttcggggccggccggattcccgtcgcctccgccgcgccgctccgcgccgccgggcacggccccgctcgctctccccggccttcccgctagggcgtctcgagggtcgggggccggacgccggtcccctcccccgcctcctcgtccgcccccccgccgtccaggtacctagcgcgttccggcgcggaggtttaaagaccccttggggggatcgcccgtccgcccgtgggtcgggggcggtggtgggcccgcgggggagtcccgtcgggaggggcccggcccctcccgcgcctccaccgcggactccgctccccggccggggccgcgccgccgccgccgccgcggcggccgtcgggtgggggctttacccggcggccgtcgcgcgcctgccgcgcgtgtggcgtgcgccccgcgccgtgggggcgggaacccccgggcgcctgtggggtggtgtccgcgctcgcccccgcgtgggcggcgcgcgcctccccgtggtgtgaaaccttccgacccctctccggagtccggtcccgtttgctgtctcgtctggccggcctgaggcaaccccctctcctcttgggcgggggggggggggacgtgccgcgccaggaagggcctcctcccggtgcgtcgtcgggagcgccctcgccaaatcgacctcgtacgactcttagcggtggatcactcggctcgtgcgtcgatgaagaacgcagctagctgcgagaattaatgtgaattgcaggacacattgatcatcgacacttcgaacgcacttgcggccccgggttcctcccggggctacgcctgtctgagcgtcgcttgccgatcaatcgcccccgggggtgcctccgggctcctcggggtgcgcggctgggggttccctcgcagggcccgccgggggccctccgtccccctaagcgcagacccggcggcgtccgccctcctcttgccgccgcgcccgccccttccccctccccccgcgggccctgcgtggtcacgcgtcgggtggcgggggggagaggggggcgcgcccggctgagagagacggggagggcggcgccgccgccgcccgcgaagacggagagggaaagagagagccggctcgggccgagttcccgtggccgccgcctgcggtccgggttcctccctcggggggctccctcgcgccgcgcgcggctcggggttcggggttcgtcggccccggccgggtggaaggtcccgtgcccgtcgtcgtcgtcgtcgtcgcgcgtcgtcggcggtgggggcgtgttgcgtgcggtgtggtggtgggggaggaggaaggcgggtccggaaggggaagggtgccggcggggagagagggtcgggggagcgcgtcccggtcgccgcggttcgccgcccgcccccggtggcggcccggcgtccggccgaccgccgctcccgcgcccctcctcctccccgccgcccctcctccgaggccccgcccgtcctcctcgccctccccgcgcgtacgcgcgcccgcccgcccggctcgcctcgcggcgcgtcggccggggccgggagcccgccccgcggcccgcccggccgcgcccgtggccgcggcgccggggttcgcgtgtccccggcggcgacccgcgggacgccgcggtgtcgtccgccgtcgcgcgcccgcctccggctcgcggccgcgccgcgccgcgccggggccccgtcccgagcttccgcgtcggggcggggcggctccgccgccgcgtcctcggacccgtccccccgacctccgcgggggagacgggtcggggcgtgcggcgcccgtcccgcccccggcccgtgcccctccctccggtcgtcccgctccggcggggcggcgcgggggtgccgccggccgcgcgctctctctcccgtcgcctctccccctcgccgggcccgtctcccgacggagcgtcgggcgggcggtcgggccggcgcgattccgtccgtccgtccgccgagcggcccgtccccctccgagacgcgacctcagatcagacgtggcgacccgctgaatttaagcatattagtcagcggaggagaagaaactaaccaggattccctcagtaacggcgagtgaacagggaagagcccagcgccgaatccccgccccgcggcggggcgcgggacatgtggcgtacggaagacccgctccccggcgccgctcgtggggggcccaagtccttctgatcgaggcccagcccgtggacggtgtgaggccggtagcggcccccggcgcgccgggcccgggtcttcccggagtcgggttgcttgggaatgcagcccaaagcgggtggtaaactccatctaaggctaaataccggcacgagaccgatagtcaacaagtaccgtaagggaaagttgaaaagaactttgaagagagagttcaagagggcgtgaaaccgttaagaggtaaacgggtggggtccgcgcagtccgcccggaggattcaacccggcggcgggtccggccgtgtcggcggcccggcggatctttcccgccccccgttcctcccgacccctccacccgccctcccttcccccgccgcccctcctcctcctccccggagggggcgggctccggcgggtgcgggggtgggcgggcggggccgggggtggggtcggcgggggaccgtcccccgaccggcgaccggccgccgccgggcgcatttccaccgcggcggtgcgccgcgaccggctccgggacggctgggaaggcccggcggggaaggtggctcggggggccccgtccgtccgtccgtccgtcctcctcctcccccgtctccgccccccggccccgcgtcctccctcgggagggcgcgcgggtcggggcggcggcggcggcggcggtggcggcggcggcggcggcggcgggaccgaaaccccccccgagtgttacagcccccccggcagcagcactcgccgaatcccggggccgagggagcgagacccgtcgccgcgctctcccccctcccggcgcccacccccgcggggaatcccccgcgaggggggtctcccccgcgggggcgcgccggcgtctcctcgtgggggggccgggccacccctcccacggcgcgaccgctctcccacccctcctccccgcgcccccgccccggcgacggggggggtgccgcgcgcgggtcggggggcggggcggactgtccccagtgcgccccgggcgggtcgcgccgtcgggcccgggggaggttctctcggggccacgcgcgcgtcccccgaagagggggacggcggagcgagcgcacggggtcggcggcgacgtcggctacccacccgacccgtcttgaaacacggaccaaggagtctaacacgtgcgcgagtcgggggctcgcacgaaagccgccgtggcgcaatgaaggtgaaggccggcgcgctcgccggccgaggtgggatcccgaggcctctccagtccgccgagggcgcaccaccggcccgtctcgcccgccgcgccggggaggtggagcacgagcgcacgtgttaggacccgaaagatggtgaactatgcctgggcagggcgaagccagaggaaactctggtggaggtccgtagcggtcctgacgtgcaaatcggtcgtccgacctgggtataggggcgaaagactaatcgaaccatctagtagctggttccctccgaagtttccctcaggatagctggcgctctcgcagacccgacgcacccccgccacgcagttttatccggtaaagcgaatgattagaggtcttggggccgaaacgatctcaacctattctcaaactttaaatgggtaagaagcccggctcgctggcgtggagccgggcgtggaatgcgagtgcctagtgggccacttttggtaagcagaactggcgctgcgggatgaaccgaacgccgggttaaggcgcccgatgccgacgctcatcagaccccagaaaaggtgttggttgatatagacagcaggacggtggccatggaagtcggaatccgctaaggagtgtgtaacaactcacctgccgaatcaactagccctgaaaatggatggcgctggagcgtcgggcccatacccggccgtcgccggcagtcgagagtggacgggagcggcgggggcggcgcgcgcgcgcgcgcgtgtggtgtgcgtcggagggcggcggcggcggcggcggcgggggtgtggggtccttcccccgcccccccccccacgcctcctcccctcctcccgcccacgccccgctccccgcccccggagccccgcggacgctacgccgcgacgagtaggagggccgctgcggtgagccttgaagcctagggcgcgggcccgggtggagccgccgcaggtgcagatcttggtggtagtagcaaatattcaaacgagaactttgaaggccgaagtggagaagggttccatgtgaacagcagttgaacatgggtcagtcggtcctgagagatgggcgagcgccgttccgaagggacgggcgatggcctccgttgccctcggccgatcgaaagggagtcgggttcagatccccgaatccggagtggcggagatgggcgccgcgaggcgtccagtgcggtaacgcgaccgatcccggagaagccggcgggagccccggggagagttctcttttctttgtgaagggcagggcgccctggaatgggttcgccccgagagaggggcccgtgccttggaaagcgtcgcggttccggcggcgtccggtgagctctcgctggcccttgaaaatccgggggagagggtgtaaatctcgcgccgggccgtacccatatccgcagcaggtctccaaggtgaacagcctctggcatgttggaacaatgtaggtaagggaagtcggcaagccggatccgtaacttcgggataaggattggctctaagggctgggtcggtcgggctggggcgcgaagcggggctgggcgcgcgccgcggctggacgaggcgccgccgccccccccacgcccggggcacccccctcgcggccctcccccgccccaccccgcgcgcgccgctcgctccctccccgccccgcgccctctctctctctctctcccccgctccccgtcctcccccctccccgggggagcgccgcgtgggggcggcggcggggggagaagggtcggggcggcaggggccggcggcggcccgccgcggggccccggcggcgggggcacggtcccccgcgaggggggcccgggcacccggggggccggcggcggcggcgactctggacgcgagccgggcccttcccgtggatcgccccagctgcggcgggcgtcgcggccgcccccggggagcccggcgggcgccggcgcgcccccccccccaccccacgtctcgtcgcgcgcgcgtccgctgggggcggggagcggtcgggcggcggcggtcggcgggcggcggggcggggcggttcgtccccccgccctacccccccggccccgtccgccccccgttcccccctcctcctcggcgcgcggcggcggcggcgggcggcggaggggccgcgggccggtcccccccgccgggtccgcccccggggccgcggttccgcgcggcgcctcgcctcggccggcgcctagcagccgacttagaactggtgcggaccaggggaatccgactgtttaattaaaacaaagcatcgcgaaggcccgcggcgggtgttgacgcgatgtgatttctgcccagtgctctgaatgtcaaagtgaagaaattcaatgaagcgcgggtaaacggcgggagtaactatgactctcttaaggtagccaaatgcctcgtcatctaattagtgacgcgcatgaatggatgaacgagattcccactgtccctacctactatccagcgaaaccacagccaagggaacgggcttggcggaatcagcggggaaagaagaccctgttgagcttgactctagtctggcacggtgaagagacatgagaggtgtagaataagtgggaggcccccggcgcccccccggtgtccccgcgaggggcccggggcggggtccgccggccctgcgggccgccggtgaaataccactactctgatcgttttttcactgacccggtgaggcgggggggcgagccccgaggggctctcgcttctggcgccaagcgcccggccgcgcgccggccgggcgcgacccgctccggggacagtgccaggtggggagtttgactggggcggtacacctgtcaaacggtaacgcaggtgtcctaaggcgagctcagggaggacagaaacctcccgtggagcagaagggcaaaagctcgcttgatcttgattttcagtacgaatacagaccgtgaaagcggggcctcacgatccttctgaccttttgggttttaagcaggaggtgtcagaaaagttaccacagggataactggcttgtggcggccaagcgttcatagcgacgtcgctttttgatccttcgatgtcggctcttcctatcattgtgaagcagaattcaccaagcgttggattgttcacccactaatagggaacgtgagctgggtttagaccgtcgtgagacaggttagttttaccctactgatgatgtgttgttgccatggtaatcctgctcagtacgagaggaaccgcaggttcagacatttggtgtatgtgcttggctgaggagccaatggggcgaagctaccatctgtgggattatgactgaacgcctctaagtcagaatcccgcccaggcggaacgatacggcagcgccgcggagcctcggttggcctcggatagccggtcccccgcctgtccccgccggcgggccgcccccccctccacgcgccccgcgcgcgcgggagggcgcgtgccccgccgcgcgccgggaccggggtccggtgcggagtgcccttcgtcctgggaaacggggcgcggctggaaaggcggccgccccctcgcccgtcacgcaccgcacgttcgtggggaacctggcgctaaaccattcgtagacgacctgcttctgggtcggggtttcgtacgtagcagagcagctccctcgctgcgatctattgaaagtcagccctcgacacaagggtttgtccgcgcgcgcgcgcgcgcgtgcgtgcggggggcccggcggggcgtgcgcgtccggcgccgtccgtccttccgttcgtcttcctccctcccggcctctcccgccgaccgcgggcgtggtggtgggggtgggggggagggcgcgcgaccccggtcggcgcgccccgcttcttcggttcccgcctcctccccgttcaccgccggggcggctcgtccgctccgggccgggacggggtccggggagcgtggtttgggagccgcggaggcggccgcgccgagccgggcccgtggcccgccggtccccgtcccgggggttggccgcgcgggccccggtggggcggccacccggggtcccggccctcgcgcgtccttcctcctcgctcctccgcacgggtcgaccagcagaccgcgggtggtgggcggcgggcggcgaggccccacggggcgtccgcgcacccggccgacctccgctcgtgacctctcctcggtcgggcctccggggtcgaccgcctgccgcccgcgggcgtgagactcagccggcgtctcgccgtgtcccgggtcgaccggcgggccttctccaccgagcggcgtgtaggagtgcccgtcgggacgaaccgcaaccggagcgtccccgtctcggtcggcacctccggggtcgaccagctgccgcccgcgagctccggacttagccggcgcctgcacgtgtcccgggtcgaccagcaggcggccgccggacgctgcggcgcaccgacgcgagggcgtcgattcccgttcgcgcgcccgcgacctccaccggcctcggcccgcggtggagctgggaccacgcggaactccctctctcacatttttttcagccccaccgcgagtttgcgtccgcgggacttttaagagggagtcactgctgccgtcagccagtaatgcttcctccttttttgcttttaggttttgtcttgcctttttttttttttttttttcttctttctttctttctttctttctttctttctttctttctttctttctttgccgctctcgctctctcgctctctccctctctcgttttctttctctttctctttctctctctctctctctctctctctctgtctctcgctctcgccctctctctctctctctttctctctgtctctctctgtctctctctctctctctctctctctctctctctctctctctctctctctctctccctccccctccctccctctctccccttccttggtgccttctcggctcttgacacttagccgctgtctcgccgtgtcccgggtcgaccggcgggccttctccaccgagcggcgtgtaagagtgcccgtcgggacgagccggacccgccgcgtccccgtctcggtcggcacctccggggtcgaccagctgccgcccgcgagctccggacttagctggcgtctgcacgtgtcccgggtcgaccagcaggcggccgccggacgctgcggcgcaccgacgcgagggcgtcgattccggttcacgcgccggcgacctccaccggcctcggcccgcggtggagctgggaccacgcggaactccctcttctacatttttttcagccccaccgcgagtttgcgtccgcgggacttttaagagggagtcactgctgccgtcagccagtaatgcttcctccttttttgcttttaggttttgtcttgccttttttttttttttttttttttctttctttctttctttctttctttctttctttctttctttctttctttctcgctctcgctctctcgctctctccctcgctcgttttctttctctttctctttctctctctctctctctctctctctctgtctctcgctctcgccctctctctctctctctttctctctgtctctctctgtctctctctctctctctctctctctctctctctctctctctctctctctctctccctccccctccctccctctctccccttccttggtgccttctcggctcttgacacttagccgctgtctcgccgtgtcccgggtcgaccggcgggccttctccaccgagcggcgtgtaagagtgcccgtcgggacgagccggacccgccgcgtccccgtctcggtcggcacctccggggtcgaccagctgccgcccgcgagctccggacttagctggcgtctgcacgtgtcccgggtcgaccagcaggcggccgccggacgctgcggcgcaccgacgcgagggcgtcgattccggttcacgcgccggcgacctccaccggcctcggcccgcggtggagctgggaccacgcggaactccctcttctacatttttttcagccccactgcgagtttgcgtccgcgggacttttaagagggagtcactgctgccgtcagccagtaatgcttcctccttttttgctttttggttttgccttgcgttttctttctttctttctttctttctttctttctttcttttctttctttctttctttctttctttctttctctctctctctctctctctctgtctctctcccctccctccctccttggtgccttctcggctcgctgctgctgctgcctctgcctccacggttcaagcaaacagcaagttttctatttcgagtaaagacgtaatttcaccattttggccgggctggtctcgaactcccgacctagtgatccgcccgcctcggcctcccaaagactgctgggagtacagatgtgagccaccatgcccggccgattccttccttttttcaatcttattttctgaacgctgccgtgtatgaacatacatctacacatacacacacacacacacacacacacacacacacacacacacacacacacacacacaccccccgtagtgataaaactatgtaaatgatatttccataattaatacgtttatattatgttacttttaatggatgaatatgtatcgaagccccatttcatttacatacacgtgtatgtatatccttcctcccttccttcattcattatttattaataattttcgtttatttattttcttttcttttggggccggcccgcctggtcttctgtctctgcgctctggtgacctcagcctcccaaatagctgggactacagggatctcttaagcccgggagggagaggttaacgtgggctgtgatcgcacacttccactccagcttacgtgggctgcggtggggtggggtgcagagaaaacgattgattgcgatctcaattgccttttagcttcattcataccctgttatttgctcgtttattctcatgggttcttctgtgtcattgtcacgttcatcgtttgcttgcctgcttgcctgtttatttccttccttccttccttccttccttccttccttccttccctccttccttccttccttccctcccttactggcagggtcttcctctgtctctgccgcccaggatcaccccaacctcaacgctttggaccgaccaaacggtcgttctgcctctgatccctcccatccccattacctgagactacaggcgcgcaccaccacaccggctgacttttatgttgtttctcatgttttccgtaggtaggtatgtgtgtgtgtgtgtgtgtgtgtgtgtgtgtgtgtgtgtgtgtgtgtgtatctatgtatgtatgtatgtatgtgagtgagatgggtttcggggttctatcatgttgcccacgctggtctcgaactcctgtcctcaagcaatccgcctgcctgcctcggccgcccacactgctgctattacaggcgtgagacgctgcgcctggctccttctacatttgcctgcctgcctgcctgcctgcctgcctgcctgcctgcctgcctgcctatcaatcgtcttctttttagtacggatgtgctctcgctttattgtccatgctctgggcacacgtggtctcttttcaaacttctatgattattattattgtaggcgtcatctcacgtgtcgaggtgatctcgaacttttaggctccagagatcctcccgcatcggcctcccggagtgctgtgatgacacgcgtgggcacggtacgctctggtcgtgtttgtcgtgggtcggttctttccgtttttaatacggggactgcgaacgaagaaaatttccagacgcatctcaccgatccgccttttcgttctttctttttattctctttagacggagtttcactcttgtcgcccagggtggagtacgatggcggctctcggctcaccgcaccctccgcctcccaggttcaagtgattctcctgcctcagccttcccgagtagctggaatgacagagatgagccatcgtgcccggctaatttttctatttttactacagatggggtttctccatcttggtcaggctggtcttcaacttccgaccgttggagaatcttaactttcttggtggtggttgttttcctttttcttttttttcttttcttttctttccttctcctccccccccacccccccttgtcgtcgtcctcctcctcctcctcctcctcctcctcctcctcctcctcctcctcctctttcatttctttcagctgggctctcctacgtgtgttgctctgttgctcacgctggtctcaaactcctggccttgacgcttctcccgtcacatccgccgtctggttgttgaaatgagcatctctcgtaaaatggaaaagatgaaagaaataaacacgaagacggaaagcacggtgtgaacgtttctcttgccgtctcccggggtgtaccttggacccggaaacacggagggagcttggctgagtgggttttcggtgccgaaacctcccgagggcctccttccctctcccccttgtccccgcttctcccccagccgaggctcccaccgccgccctggcattttccataggagaggtatgggagaggactgacacgccttccagatctatatcctgccggacgtctctggctcggcgtgccccaccggctacctgccaccttccagggagctctgaggcggatgcgacccccacccccccgtcacgtcccgctaccctcccccggctggcctttgccgggcgaccccaggggaaccgcgttgatgctgccttcggatcctccggcgaagacttccaccggatgccccgggtgggccggttgggatcagactggaccaccccggaccgtgctgttcttgggggtgggttgacgtacagggtggactggcagccccagcattgtaaagggtgcgtgggtatggaaatgtcacctaggatgccctccttcccttcggtctgccttcagctgcctcaggcgtgaagacaacttcccatcggaacctcttctcttccctttctccagcacacagatgagacgcacgagagggagaaacagctcaatagataccgctgaccttcatttgtggaatcctcagtcatcgacacacaagacaggtgactaggcagggacacagatcaaacactatttccgggtcctcgtggtgggattggtctctctctctctctctctctctctctctctcgcacgcgcacgcgcgcacacacacacacaatttccatatctagttcacagagcacactcacttccccttttcacagtacgcaggctgagtaaaacccgccccaccctccacccgttggctgacgaaaccccttctctacaattgatgaaaaagatgatctgggccgggcacgctagctcacgcctgtcactccggcactttgggaggccgaggcgggtggatcgcttggggccgggagttcgagaccaggctggccgacgtggcgaaaccccgtctctctgaaaaatagaacgattagccgggcctggtggcgtgggcttggaatcacgaccgctcgggagactggggcgggcgacttgttccaaccggggaggccgaggttgcgatgagctgagatcgtgccgtggcgatgcggcctggatgacggagcgagaccccgtctcgagagaatcatgatgttattataagatgagttgtgcgcggtgatggccgcctgtagtcgcggctactcgggaggctgagacgaggagaagatcacttgaggccccacaggtcgaggcttcggtcggccgtgacccactgtatcctgggcagtcaccggtcaaggagatatgccccttccccgtttgcttttcttttcttcccttctcttttcttctttttgcttctcttttctttctttctttctttctttctttctttctttttctttttctctcttcccctctttctttcctgccttcctgcctttcttcttttcttctttcctcccttcctcccttccttctttcctcccgcctcagcctcccaaagtgctgggatgactggcgggaggcaccatgcctgcttggcccaaagagaccctcttggaaagtgagacgcagagagcgccttccagtgatctcattgactgatttagagacggcatctcgctccgtcaccccggcagtggtgccgtcgtaactcactccctgcagcgtggacgctcctggactcgagcgatccttccacctcagcctccagagtacagagcctgggaccgcgggcacgcgccactgtgcccacaccgtttttaattgtttttttttcccccgagacagagtttcactctcgtggcctagactgcagtgcggtggcgcgatcttggctcaccgcaacctctgcctcccggtttcaagcgattctcctgcatcggcctcctgagtagccgggattgcgggcatgcgctgccacgtctggctgatttcgtatttttagtggagacggggcttctccatgtcgatcgggctggtttcgaactcccgacctcaggtgatccgccctccccggcctccggaagtgctgggatgacaggcgtgagccaccgcgcccggccttcatttttaaatgttttcccacagacggggtctcatcatttctttgcaaccctcctgcccggcgtctcaaagtgctggcgtgacgggcgtgagccactgcgcctggactccggggaatgactcacgaccaccatcgctctactgatcctttctttctttctttctttctttctttctttctttctttcttgatgaattatcttatgatttatttgtgtacttattttcagacggagtctcgctctgggcggggcgaggcgaggcgaggcacagcgcatcgctttggaagccgcggcaacgcctttcaaagccccattcgtatgcacagagccttattcccttcctggagttggagctgatgccttccgtagccttgggcttctctccattcggaagctttgacaggcgcaaccccacccagaggctggctgcggctgaggattagggggtgtgttggggctgaaaactgggtcccctatttttgatacctcagccgacacatcccccgaccgccatcgcttgctcgccctctgagatcccccgcctccaccgccttgcaggctcacctcttactttcatttcttcctttcttgcgtttgaggagggggtgcgggaatgagggtgtgtgtggggagggggtgcggggtggggacggaggggagcgtcctaagggtcgatttagtgtcatgcctctttcaccaccaccaccaccaccgaagatgacagcaaggatcggctaaataccgcgtgttctcatctagaagtgggaacttacagatgacagttcttgcatgggcagaacgagggggaccggggacgcggaagtctgcttgagggaggaggggtggaaggagagacagcttcaggaagaaaacaaaacacgaatactgtcggacacagcactgactacccgggtgatgaaatcatctgcacactgaacacccccgtcacaagtttacctatgtcacaatcttgcacatgtatgcttgaacgacaaataaaagttaggggggagaagagaggagagagagagagagagagagacagagagagacagagagagagagagaggagggagagagaaaacgaaacaccacctccttgacctgagtcagggggtttctggccttttgggagaacgttcagcgacaatgcagtatttgggcccgttctttttttttcttcttcttttctttctttttttttggactgagtctctctcgctctgtcacccaggctgcggtgcggtggcgctctctcggctcactgaaacctctgcttcccgggttccagtgattcttcttcggtagctgggattacaggcgcacaccatgacggccggctcatattcctattttcagtagagacggggtttctccacgttggccacgctggtctcgaactcctgacctcaaatgatccgccttcctgggcctcccaaagtgctggaaacgacaggcctgagccgccgggatttcagcctttaaaagcgcgggccctgccacctttcgctgtggcccttacgctcagaatgacgtgtcctctctgccgtaggttgactccttgagtcccctaggccattgcactgtagcctgggcagcaagagccaaactccgtccccccacctccccgcgcacataataactaactaacaaactaactaactaactaaactaactaaataaataaaatctctacacgtcacctctaagtgtgtgttcccgtgaggagtgatttctaagaaatggcactgtacactgaacgcagtggctcacgtctgtcatcccgaggtcaggagttcgagaccagcccggccaacgtggtgaaacccccgtctctactgaaaatacgaaatggagtcaggcgccgtggggcaggcacctgtaaccccagctactcgggaggctggggtggaagaattgcttgaacctggcaggcggaggctgcagtgacccaagatcgcaccactgcactacagcctgggcgacagagtgagacccggtctccagataaatacgtacataaataaatacacacatacatacatacatacatacatacatacatacatacatacatccatgcatacagatatacaagaaagaaaaaaagaaaagaaaagaaagagaaaatgaaagaaaaggcactgtattgctactgggctagggccttctctctgtctgtttctctctgttcgtctctgtctttctctctgtgtctctttctctgtctgtctgtctctttctttctctctgtctctgtctctgtctttgtctctctctctccctctctgcctgtctcactgtgtctgtcttctgtcttactctctttctctccccgtctgtctctctctctctctctccctccctgtttgtttctctctctccctccctgtctgtttctctctctctctttctgtctgtttctgtctctctctgtctgtctatgtctttctctgtctgtctctttctctgtctgtctgcctctctctttctttttctgtgtctctctgtcggtctctctctctctgtctgtctgtctgtctctctctctctctctctgtgcctatcttctgtcttactctctttctctgcctgtctgtctgtctctccctccctttctgtttctctctctctctctctctctctccccctctccctgtctgtttctctccgtctctctctctttctgtctgtttctcactgtctctctctgtccatctctctctctctctgtctgtctctttcgttctctctgtctgtctgtctctctctctctctctctctctctctctctttctgtctctcactctctgtgtgtatcttctgtcttactctccttctctgcctgtccgtctgtctgtctgtctgtctgtctctctctccctttctgtctctctctctctctgtccctctctctttctgtctgttcctctctctctctctgtctctgtctttctctgtctgtctgcctctctctttctttctctttctgtgtctctctgtctctctctctgtgcctatcttctgtcttactctctttctctgcctgcctgcctgtctgtctgtctgtctctctctgtctctctccctgcctttctgtttctctctctctctccctctctctctccctctctcgctctctctgtctttctctctttctctctgtttctctgtctctctctgtccgtctctgtctttttctgtctgtctctctctttctttctgtctgtctctgtctctgtctctctctctctctctgcttgtctctctcactgtgtctgtcctctgtcttactctccttctctgcctgtccgtctgtctgtctgtctctctctctctccctccctttctgtttctctctcgctctctctctctctctctctctctctctgcctgtttctctttctctctctgtctgtctctgtctttctctgtctgtctctttctctgtctgtctgtctccttctctctgtctccgtctctgtctctctctctctgtctctctctctctgcctgtctcactgtgtctgtcttctgtcttattctctttctctgtctgtctgtctctctctctcccttcctgtctctttctctctctctctctctctctttctgtctgtttctctctgcctgtctccgtctttctctgtctgcctctctctttctttttctgcgtctctctgtctctctctctctgtgcctatcttctgtcttactctgtttctctgcctgcctgtctgtctgtctgtctctctctctctctgtctctctctctttctgtctgtttctctctgtctctctgtccatctctgtctttctctgtccgtctctctctttctccctgtctctgtctctgcctctgcctctctctctctctgtctctctctttctatctgtttctctctgtctctctgtccatctctgtctttctctgtctgtctctctctttctccctgtctctgtctctgcctctctctctctctctctgtctgtctctctcactgtgtgtgtgtctctgtctctgcctctctctctctctctctctctgtctgtctctctcactgtgtgtgtctgtcttctgtcttactctccttctctgcctgtccgtctgtctgtctgtctctccctctctctccctccctttctgtttctctctctctctctctctctttctgtctgtttctctctttctctctctgtctgtctctttctctgtctgtctgtctctctctttctttttctctgtctctctgtctctctctgtgcctgtctctctgtctgtgcctatcttctgtcttactctctttctctggctgactgcctgtctctctctctctctctctctctctctctctctgcctgtctccgtccctccctccctgtctgtctgtttctctctctgtccatttctgtctgtctctttctctttctctctctttctttctctctgtctctctctgtctctctctgtctctctctctctctctctctctctctctctctctctctctctctgcctttctctctcactgtgtcggtcttctgtcttactctctttctctgcctgcctctctgtctgtctgtctgtctctctccctccatgtctctctctctctctctctcactcactgtctctccgtctctctctctttctgtctgtttctctctgtctctgtctttctgtgtgtctgtctgtctctctctctatttgtctttctccctccctgtctgtttctctctctctctctctctctctctctctccctgtctgtctgtttctctctatctctcgctgtccatctctgtctttctatgtctgtctctttctctgtcagtctgtcagacacccccgtgccgggtagggccctgccccttccacgaaagtgagaagcgcgtgcttcggtgcttagagaggccgagaggaatctagacaggcgggccttgctgggcttccccactcggtgtatgatttcgggaggtcgaggccgggtccccgcttggatgcgaggggcattttcagacttttctctcggtcacgtgtggcgtccgtacttctcctatttccccgataagctcctcgacttcaacataaacggcgtcctaagggtcgatttagtgtcatgcctctttcaccgccaccaccgaagatgaaagcaaagatcggctaaataccgcgtgttctcatctagaagtgggaacttacagatgacagttcttgcatgggcagaacgagggggaccggggacgcggaagcctgcttgagggaggaggggtggaaggagagacagcttcaggaagaaaacaaaacacgaatactgtcggacacagcactgactacccgggtgatgaaatcatctgcacactgaacacccccgtcacaagtttacctatgtcacagtcttgctcatgtatgcttgaacgacaaataaaagttcgggggggagaagagaggagagagagagagagacggggagagaggggggagagggggggggagagagagagagagagagagagagagagagagagagagagagagagaaagagaagtaaaaccaaccaccacctccttgacctgagtcagggggtttctggccttttgggagaacgttcagcgacaatgcagtatttgggcccgttctttttttcttcttcttcttttctttctttttttttggactgagtctctctcgctctgtcacccaggctgcggtgcggtggcgctctctcggctcactgaaacctctgcttcccgggttccagtgattcttcttcggtagctgggattacaggtgcgcaccatgacggccggctcatcgttctatttttagtagagacggggtttctccacgttggccacgctggtctcgaactcctgaccacaaatgatccaccttcctgggcctcccaaagtgctggaaacgacaggcctgagccgccgggatttcagcctttaaaagcgcgggccctgccacctttcgctgcggcccttacgctcagaatgacgtgtcctctctgccataggttgactccttgagtcccctaggccattgcactgtagcctgggcagcaagagccaaactccgtccccccacctccccgcgcacataataactaactaactaactaactaactaaaatctctacacgtcacccataagtgtgtgttcccgtgaggagtgatttctaagaaatggtactgtacactgaacgcagtggctcacgtctgtcatcccgaggtcaggagttcgagaccagcccggccaacgtggtgaaacccccgtctctactgaaaatacgaaatggagtcaggcgccgtggggcaggcacctgtaaccccagctactcgggaggctggggtggaagaattgcttgaacctggcaggcggaggctgcagtgacccaagatcgcaccactgcactacagcctgggcgacagagtgagacccggtctccagataaatacgtacataaataaatacacacatacatacatacatacatacatacatacatacatacatacagatatacaagaaagaaaaaaagaaaagaaaagaaagagaaaatgaaagaaaaggcactgtattgctactgggctagggccttctctctgtctgtttctctctgttcgtctctgtctttctctctgtgtctctttctctgtctgtctgtctgtctgtctgtctctttctttctttctgtctctgtctttgtccctctctctccctctctgcctgtctcactgtgtctgtcttctatcttactctctttctctccccgtctgtctctctctcactccctccctgtctgtttctctctctctctctttctgtctgtttctgtctctctctgtctgcctctctctttctctatctgtctctttctctgtctgtctgcccctctctttctttttctgtgtctctctgtctgtctctctctctctctgtgcctatcttctgtcttactctctttctctgcctgtctgtctgtctctctctgtctctccctccctttctgcttctctctctctctctctctctcccccctccctgtctgtttctctctgtctccctctctttctgtctgtttctcactgtctctctctgtctgtctgtttcattctctctgtctctgtctctgtctctctctctctctgtctctccctctctgtgtgtatcttttgtcttactctccttctctgcctgtccgtctgtctgtctgtctctctctctccctgtccctctctctttctgtctgtttctctctctctctctctctctctctctctgtctctgtctttctctgtctgtccctttctctgtctgtctgcctctctctttctctttctgtgtctctctgtctctctctctgtgcctatcttctgtcttactctctttctctgcctgtctatctgtctgtctctctctgtctctctccctgcctttctgtttctctctctctccctctctcgctctctctgtctttctctctttctctctgtttctctgtctctctctgtccgtctctgtctttttctgtctgtctgtctctctctttctttctgtcgtctgtctctgtctctgtctctgtctctctctctctctctctccttgtctctctcactgtgtctgtcttctgtcttactctccttctctgcctgtccatctgtctgtctgtctctctctctctctccctacctttctgtttctctctcgctagctctctctctctctgcctgtttctctctttctctctctgtctttctctgtctgtctctttctctgtctgtctgtctctttctctctgtctctgtctctgtctctctctctctctctctctctctgcctctctcactgtgtctgtcttctgtcttattctctttctctctctgtctctctctctctctcctttcctgtctgtttttctctctctctctctctttctgcctgtttctctctgtctgtctctgtctttctctgtctgtctgcctctctctttctttttctgcgtctctctgtctctctctctctctctctgttcctatcttctgtcttactctgtttccttgcctgcctgcctgtctgtgtgtctgtctctctctctctctctctctctctctctccctccctttctctttctctgtctctctctctctttctgggtgtttctctctgtctctctgtccatctctgtctttctatgtctgtctctctctttctctctgtctctgtctctgcctctctctctctctctctctctctctctctctctctctgtctgtctctctcactgtgtgtgtctgtcttctgtcttactctccttctctgcctgtccgtctgtctgtctgtctctccctctctctccctccctttctgtttctctctctctctctttctgtctgtttctctctttctctctctgtctgtctctttctctgtctgtctgtctctctctttctttttctctgtctctctgtctctctctgtgtctgtctctctttctgtgcctatcttctgtcttactctctttctctggctgtctgcctgtctctctctctctgcctgtctccgtccctccctccctgtctgtctgtttctctctctgtctctgtctctctgtccatctctgtctgtctctttctctttctctctctctgtctctgtctctctctctctctgcctgtctctctcactgtgtctgtcttctgtcttactctctttctctgcctgcctctctgtctgtctgtctctctccctccatgtctctctctctctctcactcactctctctccgtctctctctctttctgtctgtttctctctctgtctgtctctctccctccatgtctctctctctctctctcactcactctctctccgtctctctctctctttctgtctgtttctctctctgtctgtctctctccctccatgtctctctctctccctctcactcactctctctccgtctctctctctctttctgtctgtttctctgtctgtctgtctgtctgtctgtctctctctctctctctctctctctctctctctctgtttgtctttctccctccctgtctgtctgtctgtctctctctctctgtctctgtctctgtctctctctctttctctttctgtctgtttctctctatctctcgctgtccatctctgtctttctatgtctgtctctttctctgtcagtctgtcagacacccccgtgccgggtagggccctgccccttccacgagagtgagaagcgcgtgcttcggtgcttagagaggccgagaggaatctagacaggcgggccttgctgggcttccccactcggtgtacgatttcgggaggtcgaggccgggtccccgcttggatgcgaggggcattttcagacttttctctcggtcacgtgtggcgtccgtacttctcctatttccccgataagctcctcgacttcaacataaactgttaaggccggacgcaacacggcgaaaccccgtctctactaaaaatacaaagctgagtcgggagcggtggggcaggcccctgtaatgccagctcctcgggaggctgaggcgggagaatcgcttgaaccagggaagcggaggctgcagggagccgagatcgcgccactgcactacggcccaggctgtagagtgagtgagactcggtctctaaataaatacggaaattaattaattcattaattcttttccctgctgacggacatttgcaggcaggcatcggttgtcttcgggcatcacctagcggccactgttattgaaagtcgacgtgacacggagggaggtctcgccgacttcaccgagcctggggcaacgggtttctctctctcccttctggaggcccctccctctctccctcgttgcctagggaacctcgcctagggaacctccgccctggcgggggccctattgttctttgatcggcgctttacttttctttgtgttttggcgcctagactcttctacttgggctttgggaagggtcagtttaattttcaagttgccccccggctccccccactacccacgtcccttcaccttaatttagtgagtcggttaggtgggtttcccccaaaccgcccccccccccccgcctcccaacaccctgcttggaaaccttccagagccaccccggtgtgcctccgtcttctctccccttcccccaccccttgccggcgatctcattcttgccaggctgacatttgcatcggtgggcgtcaggcctcactcgggggccaccgtttttgaagatgggggcggcacggtcccacttccccggaggcagcttgggccgatggcatagccccttgacccgcgtgggcaagcgggcgggtctgcagttgtgaggcttttccccccgctgcttcccgcctcaggcctccctccctaggaaagcttcaccctggctgggtctcggtcaccttttatcacgatgttttagtttctccgccctccggccagcagagtttcacaatgcgaagggcgccacggctctagtctgggccttctcagtacttgcccaaaatagaaacgctttctgaaaactaataactttgctcacttaagatttccagggacggcgccttggcccgtgtttgttggcttgttttgtttcgttctgttttgttttgttcgtgtttttcctttctcgtatgtctttcttttcaggtgaagtagaaatccccagttttcaggaagacgtctattttccccaagacacgttagctgccgttttttcctgttgtgaactagcgcttttgtgactctctcaacgtgcagtgagagccggttgatgtttactatccttcatcatgacatcttattttctagaaatccgtaggcgaatgctgctgctgctcttgttgctgttgttgttgttgttgttgtcgtcgttgctgttgtcgttgtcgttgttgttgtcgttgtcgttgttttcaaagtataccccggccaccgtttatgggatcaaaagcattataaaatatgtgtgattatttcttgagcacgcccttcctccccctctctctgtctctctgtctgtctctgtctctctctttctctgtctgtcttctctctctctctctctctgtgtctctctctctctgcctgtctgtttctctctctctgcctctctctctctctctctctctctgcctgtctctctcactgtgtctgtcttctgtcttactccctttctctgtctgtctgtcggtctctctctctctctctccctgtctgtatgtttctctctgtctctgtctctctctctctttctgtttctctctctccgtctctgtctttctctgactgtctctctctttccttctctctgtctctctctgcctgtctctctcactctgtcttctgtcttactctctctctctgcctgcctgtctctctcactctctctctctgtgtgtctctctctctctttctgtttctctctgtctctctgtccgtctctgtctttctctgtctgtctctttgtctgtctgtctttgtctttccttctctctgtctctgtctctctcactgtgtctgtcttctgtcttagtctctctctctctctctccctgtctgtctgtctctctctctctctccccctgtctgtttctctctctctctctctctctctctctctctctgtctttgtctttctttctgtctctgtctctctctctctctctgtgtgtctgtcttctgtcttactgtctttctctgcctgtctgtctgtctgtctctctctgtctgtctctctctctctctccccccgtcggctgtttctctgtctctgtctgtgtctctctttctgtctgtttctctctgtctgtctttctctctctgtctctttctctctgtctctctgtctgtctctgtctctctctctgtctctctctctctgtgggggtgtgtgtgtgtgtgtgtgtgtatgtgtgtgtgtgtgtgtgtgtgtgtgtctgccttctgtcttactctctttctctgcctgtctgtctgcctgtctgtttgtctctctctctctgcctgtctctctcccttcctgtctgtttctctctctttctgtttctctctgtctctgtccatctctgtctttctccgtctgtctctttatctgtctctctccgtctgtctctttatctgtctctctctctctttctgtctttctctctctgtgtatcgttgtctctctctgtctgtctctgtctctgtctctctgtctctctctctctctctctctctctctgtctgtctgtccgtctgtctgtctcggtctctggctctcgctatctcccgccctctctttttttgcaaaagaagctcaagtacatctaatctaatcccttaccaaggcctgaattcttcacttctgacatcccagatttgatctccctacagaatgctgtacagaactggcgagttgatttctggacttggatacctcatagaaactacatatgaataaagatccaatcctaaaatctggggtggcttctccctcgactgtctcgaaaaatcgtacctctgttcccctaggatgccggaagagttttctcaatgtgcatctgcccgtgtcctaagtgatctgtgaccgagccctgtccgtcctgtctcaaatatgtacgtgcaaacacttctctccatttccacaactacccacggccccttgtggaaccactggctctttgaaaaaaatcccagaagtggttttggctttttggctaggaggcctaagcctgctgagaactttcctgcccaggatcctgtgtgaccaaaagtgcctctgctgggagctgggatcctcgggaccatgcttgctagcgctggatgagtctctggaaggacgcacgggactccgcaaagctgacctgtcccaccgaggtcaaatggatacctctgcattggcccgaggcctccgaagtacatcaccgtcaccaaccgtcaccgtcagcatccttgtgagcctgcccaaggccccgcctccggggagactcttgggagcccggccttcgtcggctaaagtccaaagggatggtgacttccacccacaaggtccccactgaacggcgaagatgtggagcgtaggtcagagaggggaccaggaggggagacgtcccgacaggcgacgagttcccaaggctctggccaccccacccacgccccacgccccacgtcccgggcacccgcgggacaccgccgctttatcccctcctctgtccacagccggccccaccccaccacgcaacccacgcacacacgctggaggttccaaaaccacacggtgtgactagagcctgacggagcgagagcccatttcacgaggtgggaggggtgggggtggggtgggttgggggttgtggggtctgtggcgagcccgattctccctcttgggtggctacaggctagaaatgaatatcgcttcttgggcggaggggcttccttaggccatcaccgcttgcgggactacctctcaaaccctcccttgaggccacaaaatagattccaccccacccatcgacgtttcccccgggtgctggatgtatcctgtcaagagacctgagcctgacaccgtcgaattaaacaccttgactggctttgtgtgtttgtttgtttctgagatggagtcttgctctgtcccccaggctggagtgcagtggcgtgatctcagctcactggaacctctgcctcctgggttcaagtgattctcctgtctcagcgccaccatggccggctctttttttttttttttttttttggtagacacggggtttcaccctctttcattggttttcactggagattctagattcgagccacacctcattccgtgccacagagagacttctttttttttttttttttaagcgcaacgcaacatgtctgccttatttgagtggcttcctatatcattataattgtgttatagatgaagaaacggtattaaacactgtgctaatgatagtgaaagtgaagacaaaagaaaggctatctattttgtggttagaataaagttgctcagtatttagagctacctaaatacgtcagcatttacactcttcctagtaaaagctggccaatctgaataatcctcctttaaacaaacacaatttttgatagggttaagatttttttaagaatgcgactcctgcaaaatagctgaacagacgatacacatttaaaaaaataacaacacaaggatcaaccagacttgggaaaaaatcgaaaaccacacaagtcttatgaagaactgagttcttaaaataggacggagaacgtagctatcggaagagaaggcagtattggcaagttgattgttacgttggtcagcagtagctggcactatctttttggccatctttcgggcaatgtaactactacagcaaaatgagatatgatccattaaacaacatattcgcaaatcaaaaagtgtttcagtaatataatgcttcagatttagaagcaaatcaaatgatagaactccactgctgtaataagtcaccccaaagatcaccgtatctgacaaaataactaccacagggttatgacttcagaatcatactttctcttgatatttacttatgtatgtatttattttttttaatttatttctcttgagacggcgtctcgctctgtcgcccaggctggagtgcgatggtgtgatctcggctcactgcaaccgccacctccctgggttcaagcgattctcctgcctcagcctcccgagtagctgggactacaggtgcccgccaccacgcccagctaatctttatacttttaatagagacggggtttcaccgtgtcggcccggatggtctcgatctcttgacctcgtgacccgcccgcctcggcctcccaaagtgctgggatgacaggcgtgagccactgagcccggccttctcttgacgtttaaactatgaagtcagtccagagaaacgcaataaatgtcaacggtgaggatggtgttgaggcagaagtaggaccacactttttcctatcttattcagttgataacaatatgacctaggtagtaatttcctatgtgcctacttatacacgagtacaaaagagtaaaacagagagactgctaaattaaagggtacgtgaagttcttcatagtaactccgtaaactggaacactgtcaaaaagcagcagctagtgaattgtttccatgtatttttctattatccaataagtgaactatgctattcctttccagtctcccaagcacttcttgtccccatcaccacttcggtgctcgaagaaaaagtaacaaatcaaggaacacaactaaagaaacacacacacaaaccaaagacaactacagcgtctgcaaaagtttgctagaagactgaaactgttgagtataaggatctggtattctacgatcatgagttcacttcagagtttgttcaagacatacgtttcgtaaggaaacatcttagttagaagttattcagcagtaggtaccatccctaagtatttttcaccaaattcgtgacaataaagagctatctaaccagaaaaattagcgagtaccggcaccatccatagggctttgtctttacgcttcattagcacttaccatgccttacaatgtctaggattgaccctgatagcatttcgaaaacaagctaatgctttgtccagttcttcagtgaagacaagctcacgccctaatgcgctataggcataagcatcatttggatccacttcgagagttctctggaagaattgaatcgcaatatcgtgttcccgttgcagaccgaaacagttccctgcagcacaccaggcctctggctggcgaatttttatccatgtctgtgaagtctttggacagaactgaaagagcaacctctttcggaggatgccaaagtgttgtagagtagatctccatgccttcgactctgtaattctcaatcctcctaacctctgagaattgtctttcagcttgcgtggactctgaaagtttacaataggcccttccgatttggcacagtacccaaccggtattgcagtggtgagaagctagatggctcaagatgctgatagcttctttgccgtggtaagaacacaaagctaaataacctttccccctttcacgaagaaggctcatcaagccttccgctgctgctttttgtagattaaaagcctgaatctgaggcgcgattgtggctattttcccttctgaaatgacggaagagtccaattttgtcacttccaggctatcacttatgttcggtggagttattgctcctttattagttttacttttggttcttctgtttgggattttaggtggaaacttcatttttaattttctcctattctcctcggttgtggagctgtcactagtcaagagtcgtgaatttcttcgaggcggtgcatttgggggagatgccatagtggggctcaatacctgaggtgttgcccttgtcggcggaccagaactttgtgtttttgcaaggactggagttacctttcggctctttcccctctgcgagaagacagacggtgttccggtttggccgattctggcaacaggcttttttgaaggggctccggtggatggcacgtcaatgacagacggtgtctcataccagtgcagttttgtcaatagggtccgtctccgggacttggggtttctaatggcaaaatgccaacacttggggttaatggactaacagctgctggtcctcctaataaacttcgaccagtttttggtttatgttgaacctgtttagatcatatggaagttcctgttcccagtgggacagtatcaggtgaaaggacagctgaatcgatagaagacactggggagtctgtattcaaggagtactttgaattggaagattctaaattccatccgtttcattcgacggtgtcctggggtgtttccgtaagaacggtctcgggctgtctgtgacataaactaggacgaggtccaagtgttgtggcgcaacacttggacaggcagttgctaaagctctctagagaggtgaatcaaaatgtttggtcaggatctggcttttcccccctatttcacatcatgattcaaagggacaccagaaggaaaggatttcaacgaaggctcttttggtcacattctgatcctttggtaagccgatctgtcttgcaatatacatgtcccgacgatggaaggggaaagcgagctgaatcaccaaactcaggaacgataatatcatcgtggcttttctgcttatgaaacactccacccgataagatttgatccccttctgcaagcttgctgagatcaacacaacatttcgcaagcaggcatttgcattgcggggtagtacaactgtgtcctttcaagagtctatatgttttataggcctttcctgagcggtaagaacaggtcgccagtaagaacaaggcttcttctgagtgtacttctgcataaaggcgttctgcgggggaaaccgcatctcggtaggcatagtggtttagtgcttgccatatagcagcctggacgggtccctgcagcaccgccatcctcgaggctcaggcccactttctgcagtgccacaggcaccccccccccccccatagcggctccggcccggccagcctcggctcatttaaaggcaccagccgccgttaccgggggatgggggagtccgagacagaatgacttctttatcctgctgactctggaaagcccggcgccttgtgatccattgcaaaccgagagtcacctcgtgtttagaacacggatccactcccaagttcagtggggggatgtgaggggtgtggcaggtaggacgaaggactctcttccttctgattcggtctgcacagtggggcctagggctggagctctctccgtgcggaccgctgactccctctaccttgggttccctcggccccaccctggaacgccgggccttggcagattctggcccttcctggcccttcagtcgctgtcagaaaccccatctcatgctcggatgccccgagtgactgtggctcgcacctctccggaaacattggaaatctctcctctacgcgcggccacctgaaaccacaggagctcgggacacacgtgctttcgggagagaatgctgagagtctcttgccgactctctcttgacttgagttcttcgtgggtgcgtggttaagacgtagtgagaccagatgtattaactcaggccgggtgctggtggctcacgcctgtaaccccaacactttgggaggccgaggccgtaggatccctcgaggaatcgcctaaccctggggaggttgaggttgcagtgagtgagccatagttgtgtcactgtgctccagtctgggcgaaagacagaatgaggccctgccacaggcaggcaggcaggcaggcaggcagaaagacaacagctgtattatgttcttctcagggtaggaagcaaaaataacagaatacagcacttaattaatttttttttttcccttcggacggagtttcactcttggtgcccacgctggagtgcagtggcaccatctcggctcaccgcaacctccacctcccgcgttcaagcgattctcctgcctcagcctcctgagtagctgggattacagggaggagccaccacacccagctgattttgtattgttagtagagacggcatttctccatgtgggtcaggctggtctcgaactggcgaccccagtggatctgcccgccccggcctcccaaagtgctggggtgacaggcgtgagccatcgtgactggccggctacgtttatttatttatttttttaattattttacttttttttagttttccattttaatctatttatttatttacatttatttatttatttatttatttacttatttatttattttcgagacagactctcgctctgctgcccaggctggagtgcagcggcgtgatctcggctcactgcaagctccgcctcccgggttcacgccattctcctgcctcagcctcccaagtagctgggactacaggcgcccgccaccgtggccggctaactttttgtattttgagtagagatggggtttcactgtggtagccaggatggtctcgatctcctgaccccgtgatccgtccacctcggcctcccaaagtgctgggatgacaggcgtgagccaccgcccccggcctatttatctatttattaactttgagtccaggttatgaaaccagttagtttttgtaatttttttttttttttttttttttgagacgaggtttcaccgtgttgccaaggcttggaccgagggatcnnnnnnnnnnnnnnnnnnnnnnnnnnnnnnnnnnnnnnnnnnnnnnnnnnnnnnnnnnnnnnnnnnnnnnnnnnnnnnnnnnnnnnnnnnnnnnnnnnnnnnnnnnnnnnnnnnnnnnnnnnnnnnnnnnnnnnnnnnnnnnnnnnnnnnnnnnnnnnnnnnnnnnnnnnnnnnnnnnnnnnnnnnnnnnnnnnnnnnnnnnnnnnnnnnnnnnnnnnnnnnnnnnnnnnnnnnnnnnnnnnnnnnnnnnnnnnnnnnnnnnnnnnnnnnnnnnnnnnnnnnnnnnnnnnnnnnnnnnnnnnnnnnnnnnnnnnnnnnnnnnnnnnnnnnnnnnnnnnnnnnnnnnnnnnnnnnnnnnnnnnnnnnnnnnnnnnnnnnnnnnnnnnnnnnnnnnnnnnnnnnnnnnnnnnnnnnnnnnnnnnnnnnnnnnnnnnnnnnnnnnnnnnnnnnnnnnnnnnnnnnnnnnnnnnnnnnnnnnnnnnnnnnnnnnnnnnnnnnnnnnnnnnnnnnnnnnnnnnnnnnnnnnnnnnnnnnnnnnnnnnnnnnnnnnnnnnnnnnnnnnnnnnnnnnnnnnnnnnnnnnnnnnnnnnnnnnnnnnnnnnnnnnnnnnnnnnnnnnnnnnnnnnnnnnnnnnnnnnnnnnnnnnnnnnnnnnnnnnnnnnnnnnnnnnnnnnnnnnnnnnnnnnnnnnnnnnnnnnnnnnnnnnnnnnnnnnnnnnnnnnnnnnnnnnnnnnnnnnnnnnnnnnnnnnnnnnnnnnnnnnnnnnnnnnnnnnnnnnnnnnnnnnnnnnnnnnnnnnnnnnnnnnnnnnnnnnnnnnnnnnnnnnnnnnnnnnnnnnnnnnnnnnnnnnnnnnnnnnnnnnnnnnnnnnnnnnnnnnnnnnnnnnnnnnnnnnnnnnnnnnnnnnnnnnnnnnnnnnnnnnnnnnnnnnnnnnnnnnnnnnnnnnnnnnnnnnnnnnnnnnnnnnnnnnnnnnnnnnnnnnnnnnnnnnnnnnnnnnnnnnnnnnnnnnnnnnnnnnnnnnnnnnnnnnnnnnnnnnnnnnnnnnnnnnnnnnnnnnnnnnnnnnnnnnnnnnnnnnnnnnnnnnnnnnnnnnnnnnnnnnnnnnnnnnnnnnnnnnnnnnnnnnnnnnnnnnnnnnnnnnnnnnnnnnnnnnnnnnnnnnnnnnnnnnnnnnnnnnnnnnnnnnnnnnnnnnnnnnnnnnnnnnnnnnnnnnnnnnnnnnnnnnnnnnnnnnnnnnnnnnnnnnnnnnnnnnnnnnnnnnnnnnnnnnnnnnnnnnnnnnnnnnnnnnnnnnnnnnnnnnnnnnnnnnnnnnnnnnnnnnnnnnnnnnnnnnnnnnnnnnnnnnnnnnnnnnnnnnnnnnnnnnnnnnnnnnnnnnnnnnnnnnnnnnnnnnnnnnnnnnnnnnnnnnnnnnnnnnnnnnnnnnnnnnnnnnnnnnnnnnnnnnnnnnnnnnnnnnnnnnnnnnnnnnnnnnnnnnnnnnnnnnnnnnnnnnnnnnnnnnnnnnnnnnnnnnnnnnnnnnnnnnnnnnnnnnnnnnnnnnnnnnnnnnnnnnnnnnnnnnnnnnnnnnnnnnnnnnnnnnnnnnnnnnnnnnnnnnnnnnnnnnnnnnnnnnnnnnnnnnnnnnnnnnnnnnnnnnnnnnnnnnnnnnnnnnnnnnnnnnnnnnnnnnnnnnnnnnnnnnnnnnnnnnnnnnnnnnnnnnnnnnnnnnnnnnnnnnnnnnnnnnnnnnnnnnnnnnnnnnnnnnnnnnnnnnnnnnnnnnnnnnnnnnnnnnnnnnnnnnnnnnnnnnnnnnnnnnnnnnnnnnnnnnnnnnnnnnnnnnnnnnnnnnnnnnnnnnnnnnnnnnnnnnnnnnnnnnnnnnnnnnnnnnnnnnnnnnnnnnnnnnnnnnnnnnnnnnnnnnnnnnnnnnnnnnnnnnnnnnnnnnnnnnnnnnnnnnnnnnnnnnnnnnnnnnnnnnnnnnnnnnnnnnnnnnnnnnnnnnnnnnnnnnnnnnnnnnnnnnnnnnnnnnnnnnnnnnnnnnnnnnnnnnnnnnnnnnnnnnnnnnnnnnnnnnnnnnnnnnnnnnnnnnnnnnnnnnnnnnnnnnnnnnnnnnnnnnnnnnnnnnnnnnnnnnnnnnnnnnnnnnnnnnnnnnnnnnnnnnnnnnnnnnnnnnnnnnnnnnnnnnnnnnnnnnnnnnnnnnnnnnnnnnnnnnnnnnnnnnnnnnnnnnnnnnnnnnnnnnnnnnnnnnnnnnnnnnnnnnnnnnnnnnnnnnnnnnnnnnnnnnnnnnnnnnnnnnnnnnnnnnnnnnnnnnnnnnnnnnnnnnnnnnnnnnnnnnnnnnnnnnnnnnnnnnnnnnnnnnnnnnnnnnnnnnnnnnnnnnnnnnnnnnnnnnnnnnnnnnnnnnnnnnnnnnnnnnnnnnnnnnnnnnnnnnnnnnnnnnnnnnnnnnnnnnnnnnnnnnnnnnnnnnnnnnnnnnnnnnnnnnnnnnnnnnnnnnnnnnnnnnnnnnnnnnnnnnnnnnnnnnnnnnnnnnnnnnnnnnnnnnnnnnnnnnnnnnnnnnnnnnnnnnnnnnnnnnnnnnnnnnnnnnnnnnnnnnnnnnnnnnnnnnnnnnnnnnnnnnnnnnnnnnnnnnnnnnnnnnnnnnnnnnnnnnnnnnnnnnnnnnnnnnnnnnnnnnnnnnnnnnnnnnnnnnnnnnnnnnnnnnnnnnnnnnnnnnnnnnnnnnnnnnnnnnnnnnnnnnnnnnnnnnnnnnnnnnnnnnnnnnnnnnnnnnnnnnnnnnnnnnnnnnnnnnnnnnnnnnnnnnnnnnnnnnnnnnnnnnnnnnnnnnnnnnnnnnnnnnnnnnnnnnnnnnnnnnnnnnnnnnnnnnnnnnnnnnnnnnnnnnnnnnnnnnnnnnnnnnnnnnnnnnnnnnnnnnnnnnnnnnnnnnnnnnnnnnnnnnnnnnnnnnnnnnnnnnnnnnnnnnnnnnnnnnnnnnnnnnnnnnnnnnnnnnnnnnnnnnnnnnnnnnnnnnnnnnnnnnnnnnnnnnnnnnnnnnnnnnnnnnnnnnnnnnnnnnnnnnnnnnnnnnnnnnnnnnnnnnnnnnnnnnnnnnnnnnnnnnnnnnnnnnnnnnnnnnnnnnnnnnnnnnnnnnnnnnnnnnnnnnnnnnnnnnnnnnnnnnnnnnnnnnnnnnnnnnnnnnnnnnnnnnnnnnnnnnnnnnnnnnnnnnnnnnnnnnnnnnnnnnnnnnnnnnnnnnnnnnnnnnnnnnnnnnnnnnnnnnnnnnnnnnnnnnnnnnnnnnnnnnnnnnnnnnnnnnnnnnnnnnnnnnnnnnnnnnnnnnnnnnnnnnnnnnnnnnnnnnnnnnnnnnnnnnnnnnnnnnnnnnnnnnnnnnnnnnnnnnnnnnnnnnnnnnnnnnnnnnnnnnnnnnnnnnnnnnnnnnnnnnnnnnnnnnnnnnnnnnnnnnnnnnnnnnnnnnnnnnnnnnnnnnnnnnnnnnnnnnnnnnnnnnnnnnnnnnnnnnnnnnnnnnnnnnnnnnnnnnnnnnnnnnnnnnnnnnnnnnnnnnnnnnnnnnnnnnnnnnnnnnnnnnnnnnnnnnnnnnnnnnnnnnnnnnnnnnnnnnnnnnnnnnnnnnnnnnnnnnnnnnnnnnnnnnnnnnnnnnnnnnnnnnnnnnnnnnnnnnnnnnnnnnnnnnnnnnnnnnnnnnnnnnnnnnnnnnnnnnnnnnnnnnnnnnnnnnnnnnnnnnnnnnnnnnnnnnnnnnnnnnnnnnnnnnnnnnnnnnnnnnnnnnnnnnnnnnnnnnnnnnnnnnnnnnnnnnnnnnnnnnnnnnnnnnnnnnnnnnnnnnnnnnnnnnnnnnnnnnnnnnnnnnnnnnnnnnnnnnnnnnnnnnnnnnnnnnnnnnnnnnnnnnnnnnnnnnnnnnnnnnnnnnnnnnnnnnnnnnnnnnnnnnnnnnnnnnnnnnnnnnnnnnnnnnnnnnnnnnnnnnnnnnnnnnnnnnnnnnnnnnnnnnnnnnnnnnnnnnnnnnnnnnnnnnnnnnnnnnnnnnnnnnnnnnnnnnnnnnnnnnnnnnnnnnnnnnnnnnnnnnnnnnnnnnnnnnnnnnnnnnnnnnnnnnnnnnnnnnnnnnnnnnnnnnnnnnnnnnnnnnnnnnnnnnnnnnnnnnnnnnnnnnnnnnnnnnnnnnnnnnnnnnnnnnnnnnnnnnnnnnnnnnnnnnnnnnnnnnnnnnnnnnnnnnnnnnnnnnnnnnnnnnnnnnnnnnnnnnnnnnnnnnnnnnnnnnnnnnnnnnnnnnnnnnnnnnnnnnnnnnnnnnnnnnnnnnnnnnnnnnnnnnnnnnnnnnnnnnnnnnnnnnnnnnnnnnnnnnnnnnnnnnnnnnnnnnnnnnnnnnnnnnnnnnnnnnnnnnnnnnnnnnnnnnnnnnnnnnnnnnnnnnnnnnnnnnnnnnnnnnnnnnnnnnnnnnnnnnnnnnnnnnnnnnnnnnnnnnnnnnnnnnnnnnnnnnnnnnnnnnnnnnnnnnnnnnnnnnnnnnnnnnnnnnnnnnnnnnnnnnnnnnnnnnnnnnnnnnnnnnnnnnnnnnnnnnnnnnnnnnnnnnnnnnnnnnnnnnnnnnnnnnnnnnnnnnnnnnnnnnnnnnnnnnnnnnnnnnnnnnnnnnnnnnnnnnnnnnnnnnnnnnnnnnnnnnnnnnnnnnnnnnnnnnnnnnnnnnnnnnnnnnnnnnnnnnnnnnnnnnnnnnnnnnnnnnnnnnnnnnnnnnnnnnnnnnnnnnnnnnnnnnnnnnnnnnnnnnnnnnnnnnnnnnnnnnnnnnnnnnnnnnnnnnnnnnnnnnnnnnnnnnnnnnnnnnnnnnnnnnnnnnnnnnnnnnnnnnnnnnnnnnnnnnnnnnnnnnnnnnnnnnnnnnnnnnnnnnnnnnnnnnnnnnnnnnnnnnnnnnnnnnnnnnnnnnnnnnnnnnnnnnnnnnnnnnnnnnnnnnnnnnnnnnnnnnnnnnnnnnnnnnnnnnnnnnnnnnnnnnnnnnnnnnnnnnnnnnnnnnnnnnnnnnnnnnnnnnnnnnnnnnnnnnnnnnnnnnnnnnnnnnnnnnnnnnnnnnnnnnnnnnnnnnnnnnnnnnnnnnnnnnnnnnnnnnnnnnnnnnnnnnnnnnnnnnnnnnnnnnnnnnnnnnnnnnnnnnnnnnnnnnnnnnnnnnnnnnnnnnnnnnnnnnnnnnnnnnnnnnnnnnnnnnnnnnnnnnnnnnnnnnnnnnnnnnnnnnnnnnnnnnnnnnnnnnnnnnnnnnnnnnnnnnnnnnnnnnnnnnnnnnnnnnnnnnnnnnnnnnnnnnnnnnnnnnnnnnnnnnnnnnnnnnnnnnnnnnnnnnnnnnnnnnnnnnnnnnnnnnnnnnnnnnnnnnnnnnnnnnnnnnnnnnnnnnnnnnnnnnnnnnnnnnnnnnnnnnnnnnnnnnnnnnnnnnnnnnnnnnnnnnnnnnnnnnnnnnnnnnnnnnnnnnnnnnnnnnnnnnnnnnnnnnnnnnnnnnnnnnnnnnnnnnnnnnnnnnnnnnnnnnnnnnnnnnnnnnnnnnnnnnnnnnnnnnnnnnnnnnnnnnnnnnnnnnnnnnnnnnnnnnnnnnnnnnnnnnnnnnnnnnnnnnnnnnnnnnnnnnnnnnnnnnnnnnnnnnnnnnnnnnnnnnnnnnnnnnnnnnnnnnnnnnnnnnnnnnnnnnnnnnnnnnnnnnnnnnnnnnnnnnnnnnnnnnnnnnnnnnnnnnnnnnnnnnnnnnnnnnnnnnnnnnnnnnnnnnnnnnnnnnnnnnnnnnnnnnnnnnnnnnnnnnnnnnnnnnnnnnnnnnnnnnnnnnnnnnnnnnnnnnnnnnnnnnnnnnnnnnnnnnnnnnnnnnnnnnnnnnnnnnnnnnnnnnnnnnnnnnnnnnnnnnnnnnnnnnnnnnnnnnnnnnnnnnnnnnnnnnnnnnnnnnnnnnnnnnnnnnnnnnnnnnnnnnnnnnnnnnnnnnnnnnnnnnnnnnnnnnnnnnnnnnnnnnnnnnnnnnnnnnnnnnnnnnnnnnnnnnnnnnnnnnnnnnnnnnnnnnnnnnnnnnnnnnnnnnnnnnnnnnnnnnnnnnnnnnnnnnnnnnnnnnnnnnnnnnnnnnnnnnnnnnnnnnnnnnnnnnnnnnnnnnnnnnnnnnnnnnnnnnnnnnnnnnnnnnnnnnnnnnnnnnnnnnnnnnnnnnnnnnnnnnnnnnnnnnnnnnnnnnnnnnnnnnnnnnnnnnnnnnnnnnnnnnnnnnnnnnnnnnnnnnnnnnnnnnnnnnnnnnnnnnnnnnnnnnnnnnnnnnnnnnnnnnnnnnnnnnnnnnnnnnnnnnnnnnnnnnnnnnnnnnnnnnnnnnnnnnnnnnnnnnnnnnnnnnnnnnnnnnnnnnnnnnnnnnnnnnnnnnnnnnnnnnnnnnnnnnnnnnnnnnnnnnnnnnnnnnnnnnnnnnnnnnnnnnnnnnnnnnnnnnnnnnnnnnnnnnnnnnnnnnnnnnnnnnnnnnnnnnnnnnnnnnnnnnnnnnnnnnnnnnnnnnnnnnnnnnnnnnnnnnnnnnnnnnnnnnnnnnnnnnnnnnnnnnnnnnnnnnnnnnnnnnnnnnnnnnnnnnnnnnnnnnnnnnnnnnnnnnnnnnnnnnnnnnnnnnnnnnnnnnnnnnnnnnnnnnnnnnnnnnnnnnnnnnnnnnnnnnnnnnnnnnnnnnnnnnnnnnnnnnnnnnnnnnnnnnnnnnnnnnnnnnnnnnnnnnnnnnnnnnnnnnnnnnnnnnnnnnnnnnnnnnnnnnnnnnnnnnnnnnnnnnnnnnnnnnnnnnnnnnnnnnnnnnnnnnnnnnnnnnnnnnnnnnnnnnnnnnnnnnnnnnnnnnnnnnnnnnnnnnnnnnnnnnnnnnnnnnnnnnnnnnnnnnnnnnnnnnnnnnnnnnnnnnnnnnnnnnnnnnnnnnnnnnnnnnnnnnnnnnnnnnnnnnnnnnnnnnnnnnnnnnnnnnnnnnnnnnnnnnnnnnnnnnnnnnnnnnnnnnnnnnnnnnnnnnnnnnnnnnnnnnnnnnnnnnnnnnnnnnnnnnnnnnnnnnnnnnnnnnnnnnnnnnnnnnnnnnnnnnnnnnnnnnnnnnnnnnnnnnnnnnnnnnnnnnnnnnnnnnnnnnnnnnnnnnnnnnnnnnnnnnnnnnnnnnnnnnnnnnnnnnnnnnnnnnnnnnnnnnnnnnnnnnnnnnnnnnnnnnnnnnnnnnnnnnnnnnnnnnnnnnnnnnnnnnnnnnnnnnnnnnnnnnnnnnnnnnnnnnnnnnnnnnnnnnnnnnnnnnnnnnnnnnnnnnnnnnnnnnnnnnnnnnnnnnnnnnnnnnnnnnnnnnnnnnnnnnnnnnnnnnnnnnnnnnnnnnnnnnnnnnnnnnnnnnnnnnnnnnnnnnnnnnnnnnnnnnnnnnnnnnnnnnnnnnnnnnnnnnnnnnnnnnnnnnnnnnnnnnnnnnnnnnnnnnnnnnnnnnnnnnnnnnnnnnnnnnnnnnnnnnnnnnnnnnnnnnnnnnnnnnnnnnnnnnnnnnnnnnnnnnnnnnnnnnnnnnnnnnnnnnnnnnnnnnnnnnnnnnnnnnnnnnnnnnnnnnnnnnnnnnnnnnnnnnnnnnnnnnnnnnnnnnnnnnnnnnnnnnnnnnnnnnnnnnnnnnnnnnnnnnnnnnnnnnnnnnnnnnnnnnnnnnnnnnnnnnnnnnnnnnnnnnnnnnnnnnnnnnnnnnnnnnnnnnnnnnnnnnnnnnnnnnnnnnnnnnnnnnnnnnnnnnnnnnnnnnnnnnnnnnnnnnnnnnnnnnnnnnnnnnnnnnnnnnnnnnnnnnnnnnnnnnnnnnnnnnnnnnnnnnnnnnnnnnnnnnnnnnnnnnnnnnnnnnnnnnnnnnnnnnnnnnnnnnnnnnnnnnnnnnnnnnnnnnnnnnnnnnnnnnnnnnnnnnnnnnnnnnnnnnnnnnnnnnnnnnnnnnnnnnnnnnnnnnnnnnnnnnnnnnnnnnnnnnnnnnnnnnnnnnnnnnnnnnnnnnnnnnnnnnnnnnnnnnnnnnnnnnnnnnnnnnnnnnnnnnnnnnnnnnnnnnnnnnnnnnnnnnnnnnnnnnnnnnnnnnnnnnnnnnnnnnnnnnnnnnnnnnnnnnnnnnnnnnnnnnnnnnnnnnnnnnnnnnnnnnnnnnnnnnnnnnnnnnnnnnnnnnnnnnnnnnnnnnnnnnnnnnnnnnnnnnnnnnnnnnnnnnnnnnnnnnnnnnnnnnnnnnnnnnnnnnnnnnnnnnnnnnnnnnnnnnnnnnnnnnnnnnnnnnnnnnnnnnnnnnnnnnnnnnnnnnnnnnnnnnnnnnnnnnnnnnnnnnnnnnnnnnnnnnnnnnnnnnnnnnnnnnnnnnnnnnnnnnnnnnnnnnnnnnnnnnnnnnnnnnnnnnnnnnnnnnnnnnnnnnnnnnnnnnnnnnnnnnnnnnnnnnnnnnnnnnnnnnnnnnnnnnnnnnnnnnnnnnnnnnnnnnnnnnnnnnnnnnnnnnnnnnnnnnnnnnnnnnnnnnnnnnnnnnnnnnnnnnnnnnnnnnnnnnnnnnnnnnnnnnnnnnnnnnnnnnnnnnnnnnnnnnnnnnnnnnnnnnnnnnnnnnnnnnnnnnnnnnnnnnnnnnnnnnnnnnnnnnnnnnnnnnnnnnnnnnnnnnnnnnnnnnnnnnnnnnnnnnnnnnnnnnnnnnnnnnnnnnnnnnnnnnnnnnnnnnnnnnnnnnnnnnnnnnnnnnnnnnnnnnnnnnnnnnnnnnnnnnnnnnnnnnnnnnnnnnnnnnnnnnnnnnnnnnnnnnnnnnnnnnnnnnnnnnnnnnnnnnnnnnnnnnnnnnnnnnnnnnnnnnnnnnnnnnnnnnnnnnnnnnnnnnnnnnnnnnnnnnnnnnnnnnnnnnnnnnnnnnnnnnnnnnnnnnnnnnnnnnnnnnnnnnnnnnnnnnnnnnnnnnnnnnnnnnnnnnnnnnnnnnnnnnnnnnnnnnnnnnnnnnnnnnnnnnnnnnnnnnnnnnnnnnnnnnnnnnnnnnnnnnnnnnnnnnnnnnnnnnnnnnnnnnnnnnnnnnnnnnnnnnnnnnnnnnnnnnnnnnnnnnnnnnnnnnnnnnnnnnnnnnnnnnnnnnnnnnnnnnnnnnnnnnnnnnnnnnnnnnnnnnnnnnnnnnnnnnnnnnnnnnnnnnnnnnnnnnnnnnnnnnnnnnnnnnnnnnnnnnnnnnnnnnnnnnnnnnnnnnnnnnnnnnnnnnnnnnnnnnnnnnnnnnnnnnnnnnnnnnnnnnnnnnnnnnnnnnnnnnnnnnnnnnnnnnnnnnnnnnnnnnnnnnnnnnnnnnnnnnnnnnnnnnnnnnnnnnnnnnnnnnnnnnnnnnnnnnnnnnnnnnnnnnnnnnnnnnnnnnnnnnnnnnnnnnnnnnnnnnnnnnnnnnnnnnnnnnnnnnnnnnnnnnnnnnnnnnnnnnnnnnnnnnnnnnnnnnnnnnnnnnnnnnnnnnnnnnnnnnnnnnnnnnnnnnnnnnnnnnnnnnnnnnnnnnnnnnnnnnnnnnnnnnnnnnnnnnnnnnnnnnnnnnnnnnnnnnnnnnnnnnnnnnnnnnnnnnnnnnnnnnnnnnnnnnnnnnnnnnnnnnnnnnnnnnnnnnnnnnnnnnnnnnnnnnnnnnnnnnnnnnnnnnnnnnnnnnnnnnnnnnnnnnnnnnnnnnnnnnnnnnnnnnnnnnnnnnnnnnnnnnnnnnnnnnnnnnnnnnnnnnnnnnnnnnnnnnnnnnnnnnnnnnnnnnnnnnnnnnnnnnnnnnnnnnnnnnnnnnnnnnnnnnnnnnnnnnnnnnnnnnnnnnnnnnnnnnnnnnnnnnnnnnnnnnnnnnnnnnnnnnnnnnnnnnnnnnnnnnnnnnnnnnnnnnnnnnnnnnnnnnnnnnnnnnnnnnnnnnnnnnnnnnnnnnnnnnnnnnnnnnnnnnnnnnnnnnnnnnnnnnnnnnnnnnnnnnnnnnnnnnnnnnnnnnnnnnnnnnnnnnnnnnnnnnnnnnnnnnnnnnnnnnnnnnnnnnnnnnnnnnnnnnnnnnnnnnnnnnnnnnnnnnnnnnnnnnnnnnnnnnnnnnnnnnnnnnnnnnnnnnnnnnnnnnnnnnnnnnnnnnnnnnnnnnnnnnnnnnnnnnnnnnnnnnnnnnnnnnnnnnnnnnnnnnnnnnnnnnnnnnnnnnnnnnnnnnnnnnnnnnnnnnnnnnnnnnnnnnnnnnnnnnnnnnnnnnnnnnnnnnnnnnnnnnnnnnnnnnnnnnnnnnnnnnnnnnnnnnnnnnnnnnnnnnnnnnnnnnnnnnnnnnnnnnnnnnnnnnnnnnnnnnnnnnnnnnnnnnnnnnnnnnnnnnnnnnnnnnnnnnnnnnnnnnnnnnnnnnnnnnnnnnnnnnnnnnnnnnnnnnnnnnnnnnnnnnnnnnnnnnnnnnnnnnnnnnnnnnnnnnnnnnnnnnnnnnnnnnnnnnnnnnnnnnnnnnnnnnnnnnnnnnnnnnnnnnnnnnnnnnnnnnnnnnnnnnnnnnnnnnnnnnnnnnnnnnnnnnnnnnnnnnnnnnnnnnnnnnnnnnnnnnnnnnnnnnnnnnnnnnnnnnnnnnnnnnnnnnnnnnnnnnnnnnnnnnnnnnnnnnnnnnnnnnnnnnnnnnnnnnnnnnnnnnnnnnnnnnnnnnnnnnnnnnnnnnnnnnnnnnnnnnnnnnnnnnnnnnnnnnnnnnnnnnnnnnnnnnnnnnnnnnnnnnnnnnnnnnnnnnnnnnnnnnnnnnnnnnnnnnnnnnnnnnnnnnnnnnnnnnnnnnnnnnnnnnnnnnnnnnnnnnnnnnnnnnnnnnnnnnnnnnnnnnnnnnnnnnnnnnnnnnnnnnnnnnnnnnnnnnnnnnnnnnnnnnnnnnnnnnnnnnnnnnnnnnnnnnnnnnnnnnnnnnnnnnnnnnnnnnnnnnnnnnnnnnnnnnnnnnnnnnnnnnnnnnnnnnnnnnnnnnnnnnnnnnnnnnnnnnnnnnnnnnnnnnnnnnnnnnnnnnnnnnnnnnnnnnnnnnnnnnnnnnnnnnnnnnnnnnnnnnnnnnnnnnnnnnnnnnnnnnnnnnnnnnnnnnnnnnnnnnnnnnnnnnnnnnnnnnnnnnnnnnnnnnnnnnnnnnnnnnnnnnnnnnnnnnnnnnnnnnnnnnnnnnnnnnnnnnnnnnnnnnnnnnnnnnnnnnnnnnnnnnnnnnnnnnnnnnnnnnnnnnnnnnnnnnnnnnnnnnnnnnnnnnnnnnnnnnnnnnnnnnnnnnnnnnnnnnnnnnnnnnnnnnnnnnnnnnnnnnnnnnnnnnnnnnnnnnnnnnnnnnnnnnnnnnnnnnnnnnnnnnnnnnnnnnnnnnnnnnnnnnnnnnnnnnnnnnnnnnnnnnnnnnnnnnnnnnnnnnnnnnnnnnnnnnnnnnnnnnnnnnnnnnnnnnnnnnnnnnnnnnnnnnnnnnnnnnnnnnnnnnnnnnnnnnnnnnnnnnnnnnnnnnnnnnnnnnnnnnnnnnnnnnnnnnnnnnnnnnnnnnnnnnnnnnnnnnnnnnnnnnnnnnnnnnnnnnnnnnnnnnnnnnnnnnnnnnnnnnnnnnnnnnnnnnnnnnnnnnnnnnnnnnnnnnnnnnnnnnnnnnnnnnnnnnnnnnnnnnnnnnnnnnnnnnnnnnnnnnnnnnnnnnnnnnnnnnnnnnnnnnnnnnnnnnnnnnnnnnnnnnnnnnnnnnnnnnnnnnnnnnnnnnnnnnnnnnnnnnnnnnnnnnnnnnnnnnnnnnnnnnnnnnnnnnnnnnnnnnnnnnnnnnnnnnnnnnnnnnnnnnnnnnnnnnnnnnnnnnnnnnnnnnnnnnnnnnnnnnnnnnnnnnnnnnnnnnnnnnnnnnnnnnnnnnnnnnnnnnnnnnnnnnnnnnnnnnnnnnnnnnnnnnnnnnnnnnnnnnnnnnnnnnnnnnnnnnnnnnnnnnnnnnnnnnnnnnnnnnnnnnnnnnnnnnnnnnnnnnnnnnnnnnnnnnnnnnnnnnnnnnnnnnnnnnnnnnnnnnnnnnnnnnnnnnnnnnnnnnnnnnnnnnnnnnnnnnnnnnnnnnnnnnnnnnnnnnnnnnnnnnnnnnnnnnnnnnnnnnnnnnnnnnnnnnnnnnnnnnnnnnnnnnnnnnnnnnnnnnnnnnnnnnnnnnnnnnnnnnnnnnnnnnnnnnnnnnnnnnnnnnnnnnnnnnnnnnnnnnnnnnnnnnnnnnnnnnnnnnnnnnnnnnnnnnnnnnnnnnnnnnnnnnnnnnnnnnnnnnnnnnnnnnnnnnnnnnnnnnnnnnnnnnnnnnnnnnnnnnnnnnnnnnnnnnnnnnnnnnnnnnnnnnnnnnnnnnnnnnnnnnnnnnnnnnnnnnnnnnnnnnnnnnnnnnnnnnnnnnnnnnnnnnnnnnnnnnnnnnnnnnnnnnnnnnnnnnnnnnnnnnnnnnnnnnnnnnnnnnnnnnnnnnnnnnnnnnnnnnnnnnnnnnnnnnnnnnnnnnnnnnnnnnnnnnnnnnnnnnnnnnnnnnnnnnnnnnnnnnnnnnnnnnnnnnnnnnnnnnnnnnnnnnnnnnnnnnnnnnnnnnnnnnnnnnnnnnnnnnnnnnnnnnnnnnnnnnnnnnnnnnnnnnnnnnnnnnnnnnnnnnnnnnnnnnnnnnnnnnnnnnnnnnnnnnnnnnnnnnnnnnnnnnnnnnnnnnnnnnnnnnnnnnnnnnnnnnnnnnnnnnnnnnnnnnnnnnnnnnnnnnnnnnnnnnnnnnnnnnnnnnnnnnnnnnnnnnnnnnnnnnnnnnnnnnnnnnnnnnnnnnnnnnnnnnnnnnnnnnnnnnnnnnnnnnnnnnnnnnnnnnnnnnnnnnnnnnnnnnnnnnnnnnnnnnnnnnnnnnnnnnnnnnnnnnnnnnnnnnnnnnnnnnnnnnnnnnnnnnnnnnnnnnnnnnnnnnnnnnnnnnnnnnnnnnnnnnnnnnnnnnnnnnnnnnnnnnnnnnnnnnnnnnnnnnnnnnnnnnnnnnnnnnnnnnnnnnnnnnnnnnnnnnnnnnnnnnnnnnnnnnnnnnnnnnnnnnnnnnnnnnnnnnnnnnnnnnnnnnnnnnnnnnnnnnnnnnnnnnnnnnnnnnnnnnnnnnnnnnnnnnnnnnnnnnnnnnnnnnnnnnnnnnnnnnnnnnnnnnnnnnnnnnnnnnnnnnnnnnnnnnnnnnnnnnnnnnnnnnnnnnnnnnnnnnnnnnnnnnnnnnnnnnnnnnnnnnnnnnnnnnnnnnnnnnnnnnnnnnnnnnnnnnnnnnnnnnnnnnnnnnnnnnnnnnnnnnnnnnnnnnnnnnnnnnnnnnnnnnnnnnnnnnnnnnnnnnnnnnnnnnnnnnnnnnnnnnnnnnnnnnnnnnnnnnnnnnnnnnnnnnnnnnnnnnnnnnnnnnnnnnnnnnnnnnnnnnnnnnnnnnnnnnnnnnnnnnnnnnnnnnnnnnnnnnnnnnnnnnnnnnnnnnnnnnnnnnnnnnnnnnnnnnnnnnnnnnnnnnnnnnnnnnnnnnnnnnnnnnnnnnnnnnnnnnnnnnnnnnnnnnnnnnnnnnnnnnnnnnnnnnnnnnnnnnnnnnnnnnnnnnnnnnnnnnnnnnnnnnnnnnnnnnnnnnnnnnnnnnnnnnnnnnnnnnnnnnnnnnnnnnnnnnnnnnnnnnnnnnnnnnnnnnnnnnnnnnnnnnnnnnnnnnnnnnnnnnnnnnnnnnnnnnnnnnnnnnnnnnnnnnnnnnnnnnnnnnnnnnnnnnnnnnnnnnnnnnnnnnnnnnnnnnnnnnnnnnnnnnnnnnnnnnnnnnnnnnnnnnnnnnnnnnnnnnnnnnnnnnnnnnnnnnnnnnnnnnnnnnnnnnnnnnnnnnnnnnnnnnnnnnnnnnnnnnnnnnnnnnnnnnnnnnnnnnnnnnnnnnnnnnnnnnnnnnnnnnnnnnnnnnnnnnnnnnnnnnnnnnnnnnnnnnnnnnnnnnnnnnnnnnnnnnnnnnnnnnnnnnnnnnnnnnnnnnnnnnnnnnnnnnnnnnnnnnnnnnnnnnnnnnnnnnnnnnnnnnnnnnnnnnnnnnnnnnnnnnnnnnnnnnnnnnnnnnnnnnnnnnnnnnnnnnnnnnnnnnnnnnnnnnnnnnnnnnnnnnnnnnnnnnnnnnnnnnnnnnnnnnnnnnnnnnnnnnnnnnnnnnnnnnnnnnnnnnnnnnnnnnnnnnnnnnnnnnnnnnnnnnnnnnnnnnnnnnnnnnnnnnnnnnnnnnnnnnnnnnnnnnnnnnnnnnnnnnnnnnnnnnnnnnnnnnnnnnnnnnnnnnnnnnnnnnnnnnnnnnnnnnnnnnnnnnnnnnnnnnnnnnnnnnnnnnnnnnnnnnnnnnnnnnnnnnnnnnnnnnnnnnnnnnnnnnnnnnnnnnnnnnnnnnnnnnnnnnnnnnnnnnnnnnnnnnnnnnnnnnnnnnnnnnnnnnnnnnnnnnnnnnnnnnnnnnnnnnnnnnnnnnnnnnnnnnnnnnnnnnnnnnnnnnnnnnnnnnnnnnnnnnnnnnnnnnnnnnnnnnnnnnnnnnnnnnnnnnnnnnnnnnnnnnnnnnnnnnnnnnnnnnnnnnnnnnnnnnnnnnnnnnnnnnnnnnnnnnnnnnnnnnnnnnnnnnnnnnnnnnnnnnnnnnnnnnnnnnnnnnnnnnnnnnnnnnnnnnnnnnnnnnnnnnnnnnnnnnnnnnnnnnnnnnnnnnnnnnnnnnnnnnnnnnnnnnnnnnnnnnnnnnnnnnnnnnnnnnnnnnnnnnnnnnnnnnnnnnnnnnnnnnnnnnnnnnnnnnnnnnnnnnnnnnnnnnnnnnnnnnnnnnnnnnnnnnnnnnnnnnnnnnnnnnnnnnnnnnnnnnnnnnnnnnnnnnnnnnnnnnnnnnnnnnnnnnnnnnnnnnnnnnnnnnnnnnnnnnnnnnnnnnnnnnnnnnnnnnnnnnnnnnnnnnnnnnnnnnnnnnnnnnnnnnnnnnnnnnnnnnnnnnnnnnnnnnnnnnnnnnnnnnnnnnnnnnnnnnnnnnnnnnnnnnnnnnnnnnnnnnnnnnnnnnnnnnnnnnnnnnnnnnnnnnnnnnnnnnnnnnnnnnnnnnnnnnnnnnnnnnnnnnnnnnnnnnnnnnnnnnnnnnnnnnnnnnnnnnnnnnnnnnnnnnnnnnnnnnnnnnnnnnnnnnnnnnnnnnnnnnnnnnnnnnnnnnnnnnnnnnnnnnnnnnnnnnnnnnnnnnnnnnnnnnnnnnnnnnnnnnnnnnnnnnnnnnnnnnnnnnnnnnnnnnnnnnnnnnnnnnnnnnnnnnnnnnnnnnnnnnnnnnnnnnnnnnnnnnnnnnnnnnnnnnnnnnnnnnnnnnnnnnnnnnnnnnnnnnnnnnnnnnnnnnnnnnnnnnnnnnnnnnnnnnnnnnnnnnnnnnnnnnnnnnnnnnnnnnnnnnnnnnnnnnnnnnnnnnnnnnnnnnnnnnnnnnnnnnnnnnnnnnnnnnnnnnnnnnnnnnnnnnnnnnnnnnnnnnnnnnnnnnnnnnnnnnnnnnnnnnnnnnnnnnnnnnnnnnnnnnnnnnnnnnnnnnnnnnnnnnnnnnnnnnnnnnnnnnnnnnnnnnnnnnnnnnnnnnnnnnnnnnnnnnnnnnnnnnnnnnnnnnnnnnnnnnnnnnnnnnnnnnnnnnnnnnnnnnnnnnnnnnnnnnnnnnnnnnnnnnnnnnnnnnnnnnnnnnnnnnnnnnnnnnnnnnnnnnnnnnnnnnnnnnnnnnnnnnnnnnnnnnnnnnnnnnnnnnnnnnnnnnnnnnnnnnnnnnnnnnnnnnnnnnnnnnnnnnnnnnnnnnnnnnnnnnnnnnnnnnnnnnnnnnnnnnnnnnnnnnnnnnnnnnnnnnnnnnnnnnnnnnnnnnnnnnnnnnnnnnnnnnnnnnnnnnnnnnnnnnnnnnnnnnnnnnnnnnnnnnnnnnnnnnnnnnnnnnnnnnnnnnnnnnnnnnnnnnnnnnnnnnnnnnnnnnnnnnnnnnnnnnnnnnnnnnnnnnnnnnnnnnnnnnnnnnnnnnnnnnnnnnnnnnnnnnnnnnnnnnnnnnnnnnnnnnnnnnnnnnnnnnnnnnnnnnnnnnnnnnnnnnnnnnnnnnnnnnnnnnnnnnnnnnnnnnnnnnnnnnnnnnnnnnnnnnnnnnnnnnnnnnnnnnnnnnnnnnnnnnnnnnnnnnnnnnnnnnnnnnnnnnnnnnnnnnnnnnnnnnnnnnnnnnnnnnnnnnnnnnnnnnnnnnnnnnnnnnnnnnnnnnnnnnnnnnnnnnnnnnnnnnnnnnnnnnnnnnnnnnnnnnnnnnnnnnnnnnnnnnnnnnnnnnnnnnnnnnnnnnnnnnnnnnnnnnnnnnnnnnnnnnnnnnnnnnnnnnnnnnnnnnnnnnnnnnnnnnnnnnnnnnnnnnnnnnnnnnnnnnnnnnnnnnnnnnnnnnnnnnnnnnnnnnnnnnnnnnnnnnnnnnnnnnnnnnnnnnnnnnnnnnnnnnnnnnnnnnnnnnnnnnnnnnnnnnnnnnnnnnnnnnnnnnnnnnnnnnnnnnnnnnnnnnnnnnnnnnnnnnnnnnnnnnnnnnnnnnnnnnnnnnnnnnnnnnnnnnnnnnnnnnnnnnnnnnnnnnnnnnnnnnnnnnnnnnnnnnnnnnnnnnnnnnnnnnnnnnnnnnnnnnnnnnnnnnnnnnnnnnnnnnnnnnnnnnnnnnnnnnnnnnnnnnnnnnnnnnnnnnnnnnnnnnnnnnnnnnnnnnnnnnnnnnnnnnnnnnnnnnnnnnnnnnnnnnnnnnnnnnnnnnnnnnnnnnnnnnnnnnnnnnnnnnnnnnnnnnnnnnnnnnnnnnnnnnnnnnnnnnnnnnnnnnnnnnnnnnnnnnnnnnnnnnnnnnnnnnnnnnnnnnnnnnnnnnnnnnnnnnnnnnnnnnnnnnnnnnnnnnnnnnnnnnnnnnnnnnnnnnnnnnnnnnnnnnnnnnnnnnnnnnnnnnnnnnnnnnnnnnnnnnnnnnnnnnnnnnnnnnnnnnnnnnnnnnnnnnnnnnnnnnnnnnnnnnnnnnnnnnnnnnnnnnnnnnnnnnnnnnnnnnnnnnnnnnnnnnnnnnnnnnnnnnnnnnnnnnnnnnnnnnnnnnnnnnnnnnnnnnnnnnnnnnnnnnnnnnnnnnnnnnnnnnnnnnnnnnnnnnnnnnnnnnnnnnnnnnnnnnnnnnnnnnnnnnnnnnnnnnnnnnnnnnnnnnnnnnnnnnnnnnnnnnnnnnnnnnnnnnnnnnnnnnnnnnnnnnnnnnnnnnnnnnnnnnnnnnnnnnnnnnnnnnnnnnnnnnnnnnnnnnnnnnnnnnnnnnnnnnnnnnnnnnnnnnnnnnnnnnnnnnnnnnnnnnnnnnnnnnnnnnnnnnnnnnnnnnnnnnnnnnnnnnnnnnnnnnnnnnnnnnnnnnnnnnnnnnnnnnnnnnnnnnnnnnnnnnnnnnnnnnnnnnnnnnnnnnnnnnnnnnnnnnnnnnnnnnnnnnnnnnnnnnnnnnnnnnnnnnnnnnnnnnnnnnnnnnnnnnnnnnnnnnnnnnnnnnnnnnnnnnnnnnnnnnnnnnnnnnnnnnnnnnnnnnnnnnnnnnnnnnnnnnnnnnnnnnnnnnnnnnnnnnnnnnnnnnnnnnnnnnnnnnnnnnnnnnnnnnnnnnnnnnnnnnnnnnnnnnnnnnnnnnnnnnnnnnnnnnnnnnnnnnnnnnnnnnnnnnnnnnnnnnnnnnnnnnnnnnnnnnnnnnnnnnnnnnnnnnnnnnnnnnnnnnnnnnnnnnnnnnnnnnnnnnnnnnnnnnnnnnnnnnnnnnnnnnnnnnnnnnnnnnnnnnnnnnnnnnnnnnnnnnnnnnnnnnnnnnnnnnnnnnnnnnnnnnnnnnnnnnnnnnnnnnnnnnnnnnnnnnnnnnnnnnnnnnnnnnnnnnnnnnnnnnnnnnnnnnnnnnnnnnnnnnnnnnnnnnnnnnnnnnnnnnnnnnnnnnnnnnnnnnnnnnnnnnnnnnnnnnnnnnnnnnnnnnnnnnnnnnnnnnnnnnnnnnnnnnnnnnnnnnnnnnnnnnnnnnnnnnnnnnnnnnnnnnnnnnnnnnnnnnnnnnnnnnnnnnnnnnnnnnnnnnnnnnnnnnnnnnnnnnnnnnnnnnnnnnnnnnnnnnnnnnnnnnnnnnnnnnnnnnnnnnnnnnnnnnnnnnnnnnnnnnnnnnnnnnnnnnnnnnnnnnnnnnnnnnnnnnnnnnnnnnnnnnnnnnnnnnnnnnnnnnnnnnnnnnnnnnnnnnnnnnnnnnnnnnnnnnnnnnnnnnnnnnnnnnnnnnnnnnnnnnnnnnnnnnnnnnnnnnnnnnnnnnnnnnnnnnnnnnnnnnnnnnnnnnnnnnnnnnnnnnnnnnnnnnnnnnnnnnnnnnnnnnnnnnnnnnnnnnnnnnnnnnnnnnnnnnnnnnnnnnnnnnnnnnnnnnnnnnnnnnnnnnnnnnnnnnnnnnnnnnnnnnnnnnnnnnnnnnnnnnnnnnnnnnnnnnnnnnnnnnnnnnnnnnnnnnnnnnnnnnnnnnnnnnnnnnnnnnnnnnnnnnnnnnnnnnnnnnnnnnnnnnnnnnnnnnnnnnnnnnnnnnnnnnnnnnnnnnnnnnnnnnnnnnnnnnnnnnnnnnnnnnnnnnnnnnnnnnnnnnnnnnnnnnnnnnnnnnnnnnnnnnnnnnnnnnnnnnnnnnnnnnnnnnnnnnnnnnnnnnnnnnnnnnnnnnnnnnnnnnnnnnnnnnnnnnnnnnnnnnnnnnnnnnnnnnnnnnnnnnnnnnnnnnnnnnnnnnnnnnnnnnnnnnnnnnnnnnnnnnnnnnnnnnnnnnnnnnnnnnnnnnnnnnnnnnnnnnnnnnnnnnnnnnnnnnnnnnnnnnnnnnnnnnnnnnnnnnnnnnnnnnnnnnnnnnnnnnnnnnnnnnnnnnnnnnnnnnnnnnnnnnnnnnnnnnnnnnnnnnnnnnnnnnnnnnnnnnnnnnnnnnnnnnnnnnnnnnnnnnnnnnnnnnnnnnnnnnnnnnnnnnnnnnnnnnnnnnnnnnnnnnnnnnnnnnnnnnnnnnnnnnnnnnnnnnnnnnnnnnnnnnnnnnnnnnnnnnnnnnnnnnnnnnnnnnnnnnnnnnnnnnnnnnnnnnnnnnnnnnnnnnnnnnnnnnnnnnnnnnnnnnnnnnnnnnnnnnnnnnnnnnnnnnnnnnnnnnnnnnnnnnnnnnnnnnnnnnnnnnnnnnnnnnnnnnnnnnnnnnnnnnnnnnnnnnnnnnnnnnnnnnnnnnnnnnnnnnnnnnnnnnnnnnnnnnnnnnnnnnnnnnnnnnnnnnnnnnnnnnnnnnnnnnnnnnnnnnnnnnnnnnnnnnnnnnnnnnnnnnnnnnnnnnnnnnnnnnnnnnnnnnnnnnnnnnnnnnnnnnnnnnnnnnnnnnnnnnnnnnnnnnnnnnnnnnnnnnnnnnnnnnnnnnnnnnnnnnnnnnnnnnnnnnnnnnnnnnnnnnnnnnnnnnnnnnnnnnnnnnnnnnnnnnnnnnnnnnnnnnnnnnnnnnnnnnnnnnnnnnnnnnnnnnnnnnnnnnnnnnnnnnnnnnnnnnnnnnnnnnnnnnnnnnnnnnnnnnnnnnnnnnnnnnnnnnnnnnnnnnnnnnnnnnnnnnnnnnnnnnnnnnnnnnnnnnnnnnnnnnnnnnnnnnnnnnnnnnnnnnnnnnnnnnnnnnnnnnnnnnnnnnnnnnnnnnnnnnnnnnnnnnnnnnnnnnnnnnnnnnnnnnnnnnnnnnnnnnnnnnnnnnnnnnnnnnnnnnnnnnnnnnnnnnnnnnnnnnnnnnnnnnnnnnnnnnnnnnnnnnnnnnnnnnnnnnnnnnnnnnnnnnnnnnnnnnnnnnnnnnnnnnnnnnnnnnnnnnnnnnnnnnnnnnnnnnnnnnnnnnnnnnnnnnnnnnnnnnnnnnnnnnnnnnnnnnnnnnnnnnnnnnnnnnnnnnnnnnnnnnnnnnnnnnnnnnnnnnnnnnnnnnnnnnnnnnnnnnnnnnnnnnnnnnnnnnnnnnnnnnnnnnnnnnnnnnnnnnnnnnnnnnnnnnnnnnnnnnnnnnnnnnnnnnnnnnnnnnnnnnnnnnnnnnnnnnnnnnnnnnnnnnnnnnnnnnnnnnnnnnnnnnnnnnnnnnnnnnnnnnnnnnnnnnnnnnnnnnnnnnnnnnnnnnnnnnnnnnnnnnnnnnnnnnnnnnnnnnnnnnnnnnnnnnnnnnnnnnnnnnnnnnnnnnnnnnnnnnnnnnnnnnnnnnnnnnnnnnnnnnnnnnnnnnnnnnnnnnnnnnnnnnnnnnnnnnnnnnnnnnnnnnnnnnnnnnnnnnnnnnnnnnnnnnnnnnnnnnnnnnnnnnnnnnnnnnnnnnnnnnnnnnnnnnnnnnnnnnnnnnnnnnnnnnnnnnnnnnnnnnnnnnnnnnnnnnnnnnnnnnnnnnnnnnnnnnnnnnnnnnnnnnnnnnnnnnnnnnnnnnnnnnnnnnnnnnnnnnnnnnnnnnnnnnnnnnnnnnnnnnnnnnnnnnnnnnnnnnnnnnnnnnnnnnnnnnnnnnnnnnnnnnnnnnnnnnnnnnnnnnnnnnnnnnnnnnnnnnnnnnnnnnnnnnnnnnnnnnnnnnnnnnnnnnnnnnnnnnnnnnnnnnnnnnnnnnnnnnnnnnnnnnnnnnnnnnnnnnnnnnnnnnnnnnnnnnnnnnnnnnnnnnnnnnnnnnnnnnnnnnnnnnnnnnnnnnnnnnnnnnnnnnnnnnnnnnnnnnnnnnnnnnnnnnnnnnnnnnnnnnnnnnnnnnnnnnnnnnnnnnnnnnnnnnnnnnnnnnnnnnnnnnnnnnnnnnnnnnnnnnnnnnnnnnnnnnnnnnnnnnnnnnnnnnnnnnnnnnnnnnnnnnnnnnnnnnnnnnnnnnnnnnnnnnnnnnnnnnnnnnnnnnnnnnnnnnnnnnnnnnnnnnnnnnnnnnnnnnnnnnnnnnnnnnnnnnnnnnnnnnnnnnnnnnnnnnnnnnnnnnnnnnnnnnnnnnnnnnnnnnnnnnnnnnnnnnnnnnnnnnnnnnnnnnnnnnnnnnnnnnnnnnnnnnnnnnnnnnnnnnnnnnnnnnnnnnnnnnnnnnnnnnnnnnnnnnnnnnnnnnnnnnnnnnnnnnnnnnnnnnnnnnnnnnnnnnnnnnnnnnnnnnnnnnnnnnnnnnnnnnnnnnnnnnnnnnnnnnnnnnnnnnnnnnnnnnnnnnnnnnnnnnnnnnnnnnnnnnnnnnnnnnnnnnnnnnnnnnnnnnnnnnnnnnnnnnnnnnnnnnnnnnnnnnnnnnnnnnnnnnnnnnnnnnnnnnnnnnnnnnnnnnnnnnnnnnnnnnnnnnnnnnnnnnnnnnnnnnnnnnnnnnnnnnnnnnnnnnnnnnnnnnnnnnnnnnnnnnnnnnnnnnnnnnnnnnnnnnnnnnnnnnnnnnnnnnnnnnnnnnnnnnnnnnnnnnnnnnnnnnnnnnnnnnnnnnnnnnnnnnnnnnnnnnnnnnnnnnnnnnnnnnnnnnnnnnnnnnnnnnnnnnnnnnnnnnnnnnnnnnnnnnnnnnnnnnnnnnnnnnnnnnnnnnnnnnnnnnnnnnnnnnnnnnnnnnnnnnnnnnnnnnnnnnnnnnnnnnnnnnnnnnnnnnnnnnnnnnnnnnnnnnnnnnnnnnnnnnnnnnnnnnnnnnnnnnnnnnnnnnnnnnnnnnnnnnnnnnnnnnnnnnnnnnnnnnnnnnnnnnnnnnnnnnnnnnnnnnnnnnnnnnnnnnnnnnnnnnnnnnnnnnnnnnnnnnnnnnnnnnnnnnnnnnnnnnnnnnnnnnnnnnnnnnnnnnnnnnnnnnnnnnnnnnnnnnnnnnnnnnnnnnnnnnnnnnnnnnnnnnnnnnnnnnnnnnnnnnnnnnnnnnnnnnnnnnnnnnnnnnnnnnnnnnnnnnnnnnnnnnnnnnnnnnnnnnnnnnnnnnnnnnnnnnnnnnnnnnnnnnnnnnnnnnnnnnnnnnnnnnnnnnnnnnnnnnnnnnnnnnnnnnnnnnnnnnnnnnnnnnnnnnnnnnnnnnnnnnnnnnnnnnnnnnnnnnnnnnnnnnnnnnnnnnnnnnnnnnnnnnnnnnnnnnnnnnnnnnnnnnnnnnnnnnnnnnnnnnnnnnnnnnnnnnnnnnnnnnnnnnnnnnnnnnnnnnnnnnnnnnnnnnnnnnnnnnnnnnnnnnnnnnnnnnnnnnnnnnnnnnnnnnnnnnnnnnnnnnnnnnnnnnnnnnnnnnnnnnnnnnnnnnnnnnnnnnnnnnnnnnnnnnnnnnnnnnnnnnnnnnnnnnnnnnnnnnnnnnnnnnnnnnnnnnnnnnnnnnnnnnnnnnnnnnnnnnnnnnnnnnnnnnnnnnnnnnnnnnnnnnnnnnnnnnnnnnnnnnnnnnnnnnnnnnnnnnnnnnnnnnnnnnnnnnnnnnnnnnnnnnnnnnnnnnnnnnnnnnnnnnnnnnnnnnnnnnnnnnnnnnnnnnnnnnnnnnnnnnnnnnnnnnnnnnnnnnnnnnnnnnnnnnnnnnnnnnnnnnnnnnnnnnnnnnnnnnnnnnnnnnnnnnnnnnnnnnnnnnnnnnnnnnnnnnnnnnnnnnnnnnnnnnnnnnnnnnnnnnnnnnnnnnnnnnnnnnnnnnnnnnnnnnnnnnnnnnnnnnnnnnnnnnnnnnnnnnnnnnnnnnnnnnnnnnnnnnnnnnnnnnnnnnnnnnnnnnnnnnnnnnnnnnnnnnnnnnnnnnnnnnnnnnnnnnnnnnnnnnnnnnnnnnnnnnnnnnnnnnnnnnnnnnnnnnnnnnnnnnnnnnnnnnnnnnnnnnnnnnnnnnnnnnnnnnnnnnnnnnnnnnnnnnnnnnnnnnnnnnnnnnnnnnnnnnnnnnnnnnnnnnnnnnnnnnnnnnnnnnnnnnnnnnnnnnnnnnnnnnnnnnnnnnnnnnnnnnnnnnnnnnnnnnnnnnnnnnnnnnnnnnnnnnnnnnnnnnnnnnnnnnnnnnnnnnnnnnnnnnnnnnnnnnnnnnnnnnnnnnnnnnnnnnnnnnnnnnnnnnnnnnnnnnnnnnnnnnnnnnnnnnnnnnnnnnnnnnnnnnnnnnnnnnnnnnnnnnnnnnnnnnnnnnnnnnnnnnnnnnnnnnnnnnnnnnnnnnnnnnnnnnnnnnnnnnnnnnnnnnnnnnnnnnnnnnnnnnnnnnnnnnnnnnnnnnnnnnnnnnnnnnnnnnnnnnnnnnnnnnnnnnnnnnnnnnnnnnnnnnnnnnnnnnnnnnnnnnnnnnnnnnnnnnnnnnnnnnnnnnnnnnnnnnnnnnnnnnnnnnnnnnnnnnnnnnnnnnnnnnnnnnnnnnnnnnnnnnnnnnnnnnnnnnnnnnnnnnnnnnnnnnnnnnnnnnnnnnnnnnnnnnnnnnnnnnnnnnnnnnnnnnnnnnnnnnnnnnnnnnnnnnnnnnnnnnnnnnnnnnnnnnnnnnnnnnnnnnnnnnnnnnnnnnnnnnnnnnnnnnnnnnnnnnnnnnnnnnnnnnnnnnnnnnnnnnnnnnnnnnnnnnnnnnnnnnnnnnnnnnnnnnnnnnnnnnnnnnnnnnnnnnnnnnnnnnnnnnnnnnnnnnnnnnnnnnnnnnnnnnnnnnnnnnnnnnnnnnnnnnnnnnnnnnnnnnnnnnnnnnnnnnnnnnnnnnnnnnnnnnnnnnnnnnnnnnnnnnnnnnnnnnnnnnnnnnnnnnnnnnnnnnnnnnnnnnnnnnnnnnnnnnnnnnnnnnnnnnnnnnnnnnnnnnnnnnnnnnnnnnnnnnnnnnnnnnnnnnnnnnnnnnnnnnnnnnnnnnnnnnnnnnnnnnnnnnnnnnnnnnnnnnnnnnnnnnnnnnnnnnnnnnnnnnnnnnnnnnnnnnnnnnnnnnnnnnnnnnnnnnnnnnnnnnnnnnnnnnnnnnnnnnnnnnnnnnnnnnnnnnnnnnnnnnnnnnnnnnnnnnnnnnnnnnnnnnnnnnnnnnnnnnnnnnnnnnnnnnnnnnnnnnnnnnnnnnnnnnnnnnnnnnnnnnnnnnnnnnnnnnnnnnnnnnnnnnnnnnnnnnnnnnnnnnnnnnnnnnnnnnnnnnnnnnnnnnnnnnnnnnnnnnnnnnnnnnnnnnnnnnnnnnnnnnnnnnnnnnnnnnnnnnnnnnnnnnnnnnnnnnnnnnnnnnnnnnnnnnnnnnnnnnnnnnnnnnnnnnnnnnnnnnnnnnnnnnnnnnnnnnnnnnnnnnnnnnnnnnnnnnnnnnnnnnnnnnnnnnnnnnnnnnnnnnnnnnnnnnnnnnnnnnnnnnnnnnnnnnnnnnnnnnnnnnnnnnnnnnnnnnnnnnnnnnnnnnnnnnnnnnnnnnnnnnnnnnnnnnnnnnnnnnnnnnnnnnnnnnnnnnnnnnnnnnnnnnnnnnnnnnnnnnnnnnnnnnnnnnnnnnnnnnnnnnnnnnnnnnnnnnnnnnnnnnnnnnnnnnnnnnnnnnnnnnnnnnnnnnnnnnnnnnnnnnnnnnnnnnnnnnnnnnnnnnnnnnnnnnnnnnnnnnnnnnnnnnnnnnnnnnnnnnnnnnnnnnnnnnnnnnnnnnnnnnnnnnnnnnnnnnnnnnnnnnnnnnnnnnnnnnnnnnnnnnnnnnnnnnnnnnnnnnnnnnnnnnnnnnnnnnnnnnnnnnnnnnnnnnnnnnnnnnnnnnnnnnnnnnnnnnnnnnnnnnnnnnnnnnnnnnnnnnnnnnnnnnnnnnnnnnnnnnnnnnnnnnnnnnnnnnnnnnnnnnnnnnnnnnnnnnnnnnnnnnnnnnnnnnnnnnnnnnnnnnnnnnnnnnnnnnnnnnnnnnnnnnnnnnnnnnnnnnnnnnnnnnnnnnnnnnnnnnnnnnnnnnnnnnnnnnnnnnnnnnnnnnnnnnnnnnnnnnnnnnnnnnnnnnnnnnnnnnnnnnnnnnnnnnnnnnnnnnnnnnnnnnnnnnnnnnnnnnnnnnnnnnnnnnnnnnnnnnnnnnnnnnnnnnnnnnnnnnnnnnnnnnnnnnnnnnnnnnnnnnnnnnnnnnnnnnnnnnnnnnnnnnnnnnnnnnnnnnnnnnnnnnnnnnnnnnnnnnnnnnnnnnnnnnnnnnnnnnnnnnnnnnnnnnnnnnnnnnnnnnnnnnnnnnnnnnnnnnnnnnnnnnnnnnnnnnnnnnnnnnnnnnnnnnnnnnnnnnnnnnnnnnnnnnnnnnnnnnnnnnnnnnnnnnnnnnnnnnnnnnnnnnnnnnnnnnnnnnnnnnnnnnnnnnnnnnnnnnnnnnnnnnnnnnnnnnnnnnnnnnnnnnnnnnnnnnnnnnnnnnnnnnnnnnnnnnnnnnnnnnnnnnnnnnnnnnnnnnnnnnnnnnnnnnnnnnnnnnnnnnnnnnnnnnnnnnnnnnnnnnnnnnnnnnnnnnnnnnnnnnnnnnnnnnnnnnnnnnnnnnnnnnnnnnnnnnnnnnnnnnnnnnnnnnnnnnnnnnnnnnnnnnnnnnnnnnnnnnnnnnnnnnnnnnnnnnnnnnnnnnnnnnnnnnnnnnnnnnnnnnnnnnnnnnnnnnnnnnnnnnnnnnnnnnnnnnnnnnnnnnnnnnnnnnnnnnnnnnnnnnnnnnnnnnnnnnnnnnnnnnnnnnnnnnnnnnnnnnnnnnnnnnnnnnnnnnnnnnnnnnnnnnnnnnnnnnnnnnnnnnnnnnnnnnnnnnnnnnnnnnnnnnnnnnnnnnnnnnnnnnnnnnnnnnnnnnnnnnnnnnnnnnnnnnnnnnnnnnnnnnnnnnnnnnnnnnnnnnnnnnnnnnnnnnnnnnnnnnnnnnnnnnnnnnnnnnnnnnnnnnnnnnnnnnnnnnnnnnnnnnnnnnnnnnnnnnnnnnnnnnnnnnnnnnnnnnnnnnnnnnnnnnnnnnnnnnnnnnnnnnnnnnnnnnnnnnnnnnnnnnnnnnnnnnnnnnnnnnnnnnnnnnnnnnnnnnnnnnnnnnnnnnnnnnnnnnnnnnnnnnnnnnnnnnnnnnnnnnnnnnnnnnnnnnnnnnnnnnnnnnnnnnnnnnnnnnnnnnnnnnnnnnnnnnnnnnnnnnnnnnnnnnnnnnnnnnnnnnnnnnnnnnnnnnnnnnnnnnnnnnnnnnnnnnnnnnnnnnnnnnnnnnnnnnnnnnnnnnnnnnnnnnnnnnnnnnnnnnnnnnnnnnnnnnnnnnnnnnnnnnnnnnnnnnnnnnnnnnnnnnnnnnnnnnnnnnnnnnnnnnnnnnnnnnnnnnnnnnnnnnnnnnnnnnnnnnnnnnnnnnnnnnnnnnnnnnnnnnnnnnnnnnnnnnnnnnnnnnnnnnnnnnnnnnnnnnnnnnnnnnnnnnnnnnnnnnnnnnnnnnnnnnnnnnnnnnnnnnnnnnnnnnnnnnnnnnnnnnnnnnnnnnnnnnnnnnnnnnnnnnnnnnnnnnnnnnnnnnnnnnnnnnnnnnnnnnnnnnnnnnnnnnnnnnnnnnnnnnnnnnnnnnnnnnnnnnnnnnnnnnnnnnnnnnnnnnnnnnnnnnnnnnnnnnnnnnnnnnnnnnnnnnnnnnnnnnnnnnnnnnnnnnnnnnnnnnnnnnnnnnnnnnnnnnnnnnnnnnnnnnnnnnnnnnnnnnnnnnnnnnnnnnnnnnnnnnnnnnnnnnnnnnnnnnnnnnnnnnnnnnnnnnnnnnnnnnnnnnnnnnnnnnnnnnnnnnnnnnnnnnnnnnnnnnnnnnnnnnnnnnnnnnnnnnnnnnnnnnnnnnnnnnnnnnnnnnnnnnnnnnnnnnnnnnnnnnnnnnnnnnnnnnnnnnnnnnnnnnnnnnnnnnnnnnnnnnnnnnnnnnnnnnnnnnnnnnnnnnnnnnnnnnnnnnnnnnnnnnnnnnnnnnnnnnnnnnnnnnnnnnnnnnnnnnnnnnnnnnnnnnnnnnnnnnnnnnnnnnnnnnnnnnnnnnnnnnnnnnnnnnnnnnnnnnnnnnnnnnnnnnnnnnnnnnnnnnnnnnnnnnnnnnnnnnnnnnnnnnnnnnnnnnnnnnnnnnnnnnnnnnnnnnnnnnnnnnnnnnnnnnnnnnnnnnnnnnnnnnnnnnnnnnnnnnnnnnnnnnnnnnnnnnnnnnnnnnnnnnnnnnnnnnnnnnnnnnnnnnnnnnnnnnnnnnnnnnnnnnnnnnnnnnnnnnnnnnnnnnnnnnnnnnnnnnnnnnnnnnnnnnnnnnnnnnnnnnnnnnnnnnnnnnnnnnnnnnnnnnnnnnnnnnnnnnnnnnnnnnnnnnnnnnnnnnnnnnnnnnnnnnnnnnnnnnnnnnnnnnnnnnnnnnnnnnnnnnnnnnnnnnnnnnnnnnnnnnnnnnnnnnnnnnnnnnnnnnnnnnnnnnnnnnnnnnnnnnnnnnnnnnnnnnnnnnnnnnnnnnnnnnnnnnnnnnnnnnnnnnnnnnnnnnnnnnnnnnnnnnnnnnnnnnnnnnnnnnnnnnnnnnnnnnnnnnnnnnnnnnnnnnnnnnnnnnnnnnnnnnnnnnnnnnnnnnnnnnnnnnnnnnnnnnnnnnnnnnnnnnnnnnnnnnnnnnnnnnnnnnnnnnnnnnnnnnnnnnnnnnnnnnnnnnnnnnnnnnnnnnnnnnnnnnnnnnnnnnnnnnnnnnnnnnnnnnnnnnnnnnnnnnnnnnnnnnnnnnnnnnnnnnnnnnnnnnnnnnnnnnnnnnnnnnnnnnnnnnnnnnnnnnnnnnnnnnnnnnnnnnnnnnnnnnnnnnnnnnnnnnnnnnnnnnnnnnnnnnnnnnnnnnnnnnnnnnnnnnnnnnnnnnnnnnnnnnnnnnnnnnnnnnnnnnnnnnnnnnnnnnnnnnnnnnnnnnnnnnnnnnnnnnnnnnnnnnnnnnnnnnnnnnnnnnnnnnnnnnnnnnnnnnnnnnnnnnnnnnnnnnnnnnnnnnnnnnnnnnnnnnnnnnnnnnnnnnnnnnnnnnnnnnnnnnnnnnnnnnnnnnnnnnnnnnnnnnnnnnnnnnnnnnnnnnnnnnnnnnnnnnnnnnnnnnnnnnnnnnnnnnnnnnnnnnnnnnnnnnnnnnnnnnnnnnnnnnnnnnnnnnnnnnnnnnnnnnnnnnnnnnnnnnnnnnnnnnnnnnnnnnnnnnnnnnnnnnnnnnnnnnnnnnnnnnnnnnnnnnnnnnnnnnnnnnnnnnnnnnnnnnnnnnnnnnnnnnnnnnnnnnnnnnnnnnnnnnnnnnnnnnnnnnnnnnnnnnnnnnnnnnnnnnnnnnnnnnnnnnnnnnnnnnnnnnnnnnnnnnnnnnnnnnnnnnnnnnnnnnnnnnnnnnnnnnnnnnnnnnnnnnnnnnnnnnnnnnnnnnnnnnnnnnnnnnnnnnnnnnnnnnnnnnnnnnnnnnnnnnnnnnnnnnnnnnnnnnnnnnnnnnnnnnnnnnnnnnnnnnnnnnnnnnnnnnnnnnnnnnnnnnnnnnnnnnnnnnnnnnnnnnnnnnnnnnnnnnnnnnnnnnnnnnnnnnnnnnnnnnnnnnnnnnnnnnnnnnnnnnnnnnnnnnnnnnnnnnnnnnnnnnnnnnnnnnnnnnnnnnnnnnnnnnnnnnnnnnnnnnnnnnnnnnnnnnnnnnnnnnnnnnnnnnnnnnnnnnnnnnnnnnnnnnnnnnnnnnnnnnnnnnnnnnnnnnnnnnnnnnnnnnnnnnnnnnnnnnnnnnnnnnnnnnnnnnnnnnnnnnnnnnnnnnnnnnnnnnnnnnnnnnnnnnnnnnnnnnnnnnnnnnnnnnnnnnnnnnnnnnnnnnnnnnnnnnnnnnnnnnnnnnnnnnnnnnnnnnnnnnnnnnnnnnnnnnnnnnnnnnnnnnnnnnnnnnnnnnnnnnnnnnnnnnnnnnnnnnnnnnnnnnnnnnnnnnnnnnnnnnnnnnnnnnnnnnnnnnnnnnnnnnnnnnnnnnnnnnnnnnnnnnnnnnnnnnnnnnnnnnnnnnnnnnnnnnnnnnnnnnnnnnnnnnnnnnnnnnnnnnnnnnnnnnnnnnnnnnnnnnnnnnnnnnnnnnnnnnnnnnnnnnnnnnnnnnnnnnnnnnnnnnnnnnnnnnnnnnnnnnnnnnnnnnnnnnnnnnnnnnnnnnnnnnnnnnnnnnnnnnnnnnnnnnnnnnnnnnnnnnnnnnnnnnnnnnnnnnnnnnnnnnnnnnnnnnnnnnnnnnnnnnnnnnnnnnnnnnnnnnnnnnnnnnnnnnnnnnnnnnnnnnnnnnnnnnnnnnnnnnnnnnnnnnnnnnnnnnnnnnnnnnnnnnnnnnnnnnnnnnnnnnnnnnnnnnnnnnnnnnnnnnnnnnnnnnnnnnnnnnnnnnnnnnnnnnnnnnnnnnnnnnnnnnnnnnnnnnnnnnnnnnnnnnnnnnnnnnnnnnnnnnnnnnnnnnnnnnnnnnnnnnnnnnnnnnnnnnnnnnnnnnnnnnnnnnnnnnnnnnnnnnnnnnnnnnnnnnnnnnnnnnnnnnnnnnnnnnnnnnnnnnnnnnnnnnnnnnnnnnnnnnnnnnnnnnnnnnnnnnnnnnnnnnnnnnnnnnnnnnnnnnnnnnnnnnnnnnnnnnnnnnnnnnnnnnnnnnnnnnnnnnnnnnnnnnnnnnnnnnnnnnnnnnnnnnnnnnnnnnnnnnnnnnnnnnnnnnnnnnnnnnnnnnnnnnnnnnnnnnnnnnnnnnnnnnnnnnnnnnnnnnnnnnnnnnnnnnnnnnnnnnnnnnnnnnnnnnnnnnnnnnnnnnnnnnnnnnnnnnnnnnnnnnnnnnnnnnnnnnnnnnnnnnnnnnnnnnnnnnnnnnnnnnnnnnnnnnnnnnnnnnnnnnnnnnnnnnnnnnnnnnnnnnnnnnnnnnnnnnnnnnnnnnnnnnnnnnnnnnnnnnnnnnnnnnnnnnnnnnnnnnnnnnnnnnnnnnnnnnnnnnnnnnnnnnnnnnnnnnnnnnnnnnnnnnnnnnnnnnnnnnnnnnnnnnnnnnnnnnnnnnnnnnnnnnnnnnnnnnnnnnnnnnnnnnnnnnnnnnnnnnnnnnnnnnnnnnnnnnnnnnnnnnnnnnnnnnnnnnnnnnnnnnnnnnnnnnnnnnnnnnnnnnnnnnnnnnnnnnnnnnnnnnnnnnnnnnnnnnnnnnnnnnnnnnnnnnnnnnnnnnnnnnnnnnnnnnnnnnnnnnnnnnnnnnnnnnnnnnnnnnnnnnnnnnnnnnnnnnnnnnnnnnnnnnnnnnnnnnnnnnnnnnnnnnnnnnnnnnnnnnnnnnnnnnnnnnnnnnnnnnnnnnnnnnnnnnnnnnnnnnnnnnnnnnnnnnnnnnnnnnnnnnnnnnnnnnnnnnnnnnnnnnnnnnnnnnnnnnnnnnnnnnnnnnnnnnnnnnnnnnnnnnnnnnnnnnnnnnnnnnnnnnnnnnnnnnnnnnnnnnnnnnnnnnnnnnnnnnnnnnnnnnnnnnnnnnnnnnnnnnnnnnnnnnnnnnnnnnnnnnnnnnnnnnnnnnnnnnnnnnnnnnnnnnnnnnnnnnnnnnnnnnnnnnnnnnnnnnnnnnnnnnnnnnnnnnnnnnnnnnnnnnnnnnnnnnnnnnnnnnnnnnnnnnnnnnnnnnnnnnnnnnnnnnnnnnnnnnnnnnnnnnnnnnnnnnnnnnnnnnnnnnnnnnnnnnnnnnnnnnnnnnnnnnnnnnnnnnnnnnnnnnnnnnnnnnnnnnnnnnnnnnnnnnnnnnnnnnnnnnnnnnnnnnnnnnnnnnnnnnnnnnnnnnnnnnnnnnnnnnnnnnnnnnnnnnnnnnnnnnnnnnnnnnnnnnnnnnnnnnnnnnnnnnnnnnnnnnnnnnnnnnnnnnnnnnnnnnnnnnnnnnnnnnnnnnnnnnnnnnnnnnnnnnnnnnnnnnnnnnnnnnnnnnnnnnnnnnnnnnnnnnnnnnnnnnnnnnnnnnnnnnnnnnnnnnnnnnnnnnnnnnnnnnnnnnnnnnnnnnnnnnnnnnnnnnnnnnnnnnnnnnnnnnnnnnnnnnnnnnnnnnnnnnnnnnnnnnnnnnnnnnnnnnnnnnnnnnnnnnnnnnnnnnnnnnnnnnnnnnnnnnnnnnnnnnnnnnnnnnnnnnnnnnnnnnnnnnnnnnnnnnnnnnnnnnnnnnnnnnnnnnnnnnnnnnnnnnnnnnnnnnnnnnnnnnnnnnnnnnnnnnnnnnnnnnnnnnnnnnnnnnnnnnnnnnnnnnnnnnnnnnnnnnnnnnnnnnnnnnnnnnnnnnnnnnnnnnnnnnnnnnnnnnnnnnnnnnnnnnnnnnnnnnnnnnnnnnnnnnnnnnnnnnnnnnnnnnnnnnnnnnnnnnnnnnnnnnnnnnnnnnnnnnnnnnnnnnnnnnnnnnnnnnnnnnnnnnnnnnnnnnnnnnnnnnnnnnnnnnnnnnnnnnnnnnnnnnnnnnnnnnnnnnnnnnnnnnnnnnnnnnnnnnnnnnnnnnnnnnnnnnnnnnnnnnnnnnnnnnnnnnnnnnnnnnnnnnnnnnnnnnnnnnnnnnnnnnnnnnnnnnnnnnnnnnnnnnnnnnnnnnnnnnnnnnnnnnnnnnnnnnnnnnnnnnnnnnnnnnnnnnnnnnnnnnnnnnnnnnnnnnnnnnnnnnnnnnnnnnnnnnnnnnnnnnnnnnnnnnnnnnnnnnnnnnnnnnnnnnnnnnnnnnnnnnnnnnnnnnnnnnnnnnnnnnnnnnnnnnnnnnnnnnnnnnnnnnnnnnnnnnnnnnnnnnnnnnnnnnnnnnnnnnnnnnnnnnnnnnnnnnnnnnnnnnnnnnnnnnnnnnnnnnnnnnnnnnnnnnnnnnnnnnnnnnnnnnnnnnnnnnnnnnnnnnnnnnnnnnnnnnnnnnnnnnnnnnnnnnnnnnnnnnnnnnnnnnnnnnnnnnnnnnnnnnnnnnnnnnnnnnnnnnnnnnnnnnnnnnnnnnnnnnnnnnnnnnnnnnnnnnnnnnnnnnnnnnnnnnnnnnnnnnnnnnnnnnnnnnnnnnnnnnnnnnnnnnnnnnnnnnnnnnnnnnnnnnnnnnnnnnnnnnnnnnnnnnnnnnnnnnnnnnnnnnnnnnnnnnnnnnnnnnnnnnnnnnnnnnnnnnnnnnnnnnnnnnnnnnnnnnnnnnnnnnnnnnnnnnnnnnnnnnnnnnnnnnnnnnnnnnnnnnnnnnnnnnnnnnnnnnnnnnnnnnnnnnnnnnnnnnnnnnnnnnnnnnnnnnnnnnnnnnnnnnnnnnnnnnnnnnnnnnnnnnnnnnnnnnnnnnnnnnnnnnnnnnnnnnnnnnnnnnnnnnnnnnnnnnnnnnnnnnnnnnnnnnnnnnnnnnnnnnnnnnnnnnnnnnnnnnnnnnnnnnnnnnnnnnnnnnnnnnnnnnnnnnnnnnnnnnnnnnnnnnnnnnnnnnnnnnnnnnnnnnnnnnnnnnnnnnnnnnnnnnnnnnnnnnnnnnnnnnnnnnnnnnnnnnnnnnnnnnnnnnnnnnnnnnnnnnnnnnnnnnnnnnnnnnnnnnnnnnnnnnnnnnnnnnnnnnnnnnnnnnnnnnnnnnnnnnnnnnnnnnnnnnnnnnnnnnnnnnnnnnnnnnnnnnnnnnnnnnnnnnnnnnnnnnnnnnnnnnnnnnnnnnnnnnnnnnnnnnnnnnnnnnnnnnnnnnnnnnnnnnnnnnnnnnnnnnnnnnnnnnnnnnnnnnnnnnnnnnnnnnnnnnnnnnnnnnnnnnnnnnnnnnnnnnnnnnnnnnnnnnnnnnnnnnnnnnnnnnnnnnnnnnnnnnnnnnnnnnnnnnnnnnnnnnnnnnnnnnnnnnnnnnnnnnnnnnnnnnnnnnnnnnnnnnnnnnnnnnnnnnnnnnnnnnnnnnnnnnnnnnnnnnnnnnnnnnnnnnnnnnnnnnnnnnnnnnnnnnnnnnnnnnnnnnnnnnnnnnnnnnnnnnnnnnnnnnnnnnnnnnnnnnnnnnnnnnnnnnnnnnnnnnnnnnnnnnnnnnnnnnnnnnnnnnnnnnnnnnnnnnnnnnnnnnnnnnnnnnnnnnnnnnnnnnnnnnnnnnnnnnnnnnnnnnnnnnnnnnnnnnnnnnnnnnnnnnnnnnnnnnnnnnnnnnnnnnnnnnnnnnnnnnnnnnnnnnnnnnnnnnnnnnnnnnnnnnnnnnnnnnnnnnnnnnnnnnnnnnnnnnnnnnnnnnnnnnnnnnnnnnnnnnnnnnnnnnnnnnnnnnnnnnnnnnnnnnnnnnnnnnnnnnnnnnnnnnnnnnnnnnnnnnnnnnnnnnnnnnnnnnnnnnnnnnnnnnnnnnnnnnnnnnnnnnnnnnnnnnnnnnnnnnnnnnnnnnnnnnnnnnnnnnnnnnnnnnnnnnnnnnnnnnnnnnnnnnnnnnnnnnnnnnnnnnnnnnnnnnnnnnnnnnnnnnnnnnnnnnnnnnnnnnnnnnnnnnnnnnnnnnnnnnnnnnnnnnnnnnnnnnnnnnnnnnnnnnnnnnnnnnnnnnnnnnnnnnnnnnnnnnnnnnnnnnnnnnnnnnnnnnnnnnnnnnnnnnnnnnnnnnnnnnnnnnnnnnnnnnnnnnnnnnnnnnnnnnnnnnnnnnnnnnnnnnnnnnnnnnnnnnnnnnnnnnnnnnnnnnnnnnnnnnnnnnnnnnnnnnnnnnnnnnnnnnnnnnnnnnnnnnnnnnnnnnnnnnnnnnnnnnnnnnnnnnnnnnnnnnnnnnnnnnnnnnnnnnnnnnnnnnnnnnnnnnnnnnnnnnnnnnnnnnnnnnnnnnnnnnnnnnnnnnnnnnnnnnnnnnnnnnnnnnnnnnnnnnnnnnnnnnnnnnnnnnnnnnnnnnnnnnnnnnnnnnnnnnnnnnnnnnnnnnnnnnnnnnnnnnnnnnnnnnnnnnnnnnnnnnnnnnnnnnnnnnnnnnnnnnnnnnnnnnnnnnnnnnnnnnnnnnnnnnnnnnnnnnnnnnnnnnnnnnnnnnnnnnnnnnnnnnnnnnnnnnnnnnnnnnnnnnnnnnnnnnnnnnnnnnnnnnnnnnnnnnnnnnnnnnnnnnnnnnnnnnnnnnnnnnnnnnnnnnnnnnnnnnnnnnnnnnnnnnnnnnnnnnnnnnnnnnnnnnnnnnnnnnnnnnnnnnnnnnnnnnnnnnnnnnnnnnnnnnnnnnnnnnnnnnnnnnnnnnnnnnnnnnnnnnnnnnnnnnnnnnnnnnnnnnnnnnnnnnnnnnnnnnnnnnnnnnnnnnnnnnnnnnnnnnnnnnnnnnnnnnnnnnnnnnnnnnnnnnnnnnnnnnnnnnnnnnnnnnnnnnnnnnnnnnnnnnnnnnnnnnnnnnnnnnnnnnnnnnnnnnnnnnnnnnnnnnnnnnnnnnnnnnnnnnnnnnnnnnnnnnnnnnnnnnnnnnnnnnnnnnnnnnnnnnnnnnnnnnnnnnnnnnnnnnnnnnnnnnnnnnnnnnnnnnnnnnnnnnnnnnnnnnnnnnnnnnnnnnnnnnnnnnnnnnnnnnnnnnnnnnnnnnnnnnnnnnnnnnnnnnnnnnnnnnnnnnnnnnnnnnnnnnnnnnnnnnnnnnnnnnnnnnnnnnnnnnnnnnnnnnnnnnnnnnnnnnnnnnnnnnnnnnnnnnnnnnnnnnnnnnnnnnnnnnnnnnnnnnnnnnnnnnnnnnnnnnnnnnnnnnnnnnnnnnnnnnnnnnnnnnnnnnnnnnnnnnnnnnnnnnnnnnnnnnnnnnnnnnnnnnnnnnnnnnnnnnnnnnnnnnnnnnnnnnnnnnnnnnnnnnnnnnnnnnnnnnnnnnnnnnnnnnnnnnnnnnnnnnnnnnnnnnnnnnnnnnnnnnnnnnnnnnnnnnnnnnnnnnnnnnnnnnnnnnnnnnnnnnnnnnnnnnnnnnnnnnnnnnnnnnnnnnnnnnnnnnnnnnnnnnnnnnnnnnnnnnnnnnnnnnnnnnnnnnnnnnnnnnnnnnnnnnnnnnnnnnnnnnnnnnnnnnnnnnnnnnnnnnnnnnnnnnnnnnnnnnnnnnnnnnnnnnnnnnnnnnnnnnnnnnnnnnnnnnnnnnnnnnnnnnnnnnnnnnnnnnnnnnnnnnnnnnnnnnnnnnnnnnnnnnnnnnnnnnnnnnnnnnnnnnnnnnnnnnnnnnnnnnnnnnnnnnnnnnnnnnnnnnnnnnnnnnnnnnnnnnnnnnnnnnnnnnnnnnnnnnnnnnnnnnnnnnnnnnnnnnnnnnnnnnnnnnnnnnnnnnnnnnnnnnnnnnnnnnnnnnnnnnnnnnnnnnnnnnnnnnnnnnnnnnnnnnnnnnnnnnnnnnnnnnnnnnnnnnnnnnnnnnnnnnnnnnnnnnnnnnnnnnnnnnnnnnnnnnnnnnnnnnnnnnnnnnnnnnnnnnnnnnnnnnnnnnnnnnnnnnnnnnnnnnnnnnnnnnnnnnnnnnnnnnnnnnnnnnnnnnnnnnnnnnnnnnnnnnnnnnnnnnnnnnnnnnnnnnnnnnnnnnnnnnnnnnnnnnnnnnnnnnnnnnnnnnnnnnnnnnnnnnnnnnnnnnnnnnnnnnnnnnnnnnnnnnnnnnnnnnnnnnnnnnnnnnnnnnnnnnnnnnnnnnnnnnnnnnnnnnnnnnnnnnnnnnnnnnnnnnnnnnnnnnnnnnnnnnnnnnnnnnnnnnnnnnnnnnnnnnnnnnnnnnnnnnnnnnnnnnnnnnnnnnnnnnnnnnnnnnnnnnnnnnnnnnnnnnnnnnnnnnnnnnnnnnnnnnnnnnnnnnnnnnnnnnnnnnnnnnnnnnnnnnnnnnnnnnnnnnnnnnnnnnnnnnnnnnnnnnnnnnnnnnnnnnnnnnnnnnnnnnnnnnnnnnnnnnnnnnnnnnnnnnnnnnnnnnnnnnnnnnnnnnnnnnnnnnnnnnnnnnnnnnnnnnnnnnnnnnnnnnnnnnnnnnnnnnnnnnnnnnnnnnnnnnnnnnnnnnnnnnnnnnnnnnnnnnnnnnnnnnnnnnnnnnnnnnnnnnnnnnnnnnnnnnnnnnnnnnnnnnnnnnnnnnnnnnnnnnnnnnnnnnnnnnnnnnnnnnnnnnnnnnnnnnnnnnnnnnnnnnnnnnnnnnnnnnnnnnnnnnnnnnnnnnnnnnnnnnnnnnnnnnnnnnnnnnnnnnnnnnnnnnnnnnnnnnnnnnnnnnnnnnnnnnnnnnnnnnnnnnnnnnnnnnnnnnnnnnnnnnnnnnnnnnnnnnnnnnnnnnnnnnnnnnnnnnnnnnnnnnnnnnnnnnnnnnnnnnnnnnnnnnnnnnnnnnnnnnnnnnnnnnnnnnnnnnnnnnnnnnnnnnnnnnnnnnnnnnnnnnnnnnnnnnnnnnnnnnnnnnnnnnnnnnnnnnnnnnnnnnnnnnnnnnnnnnnnnnnnnnnnnnnnnnnnnnnnnnnnnnnnnnnnnnnnnnnnnnnnnnnnnnnnnnnnnnnnnnnnnnnnnnnnnnnnnnnnnnnnnnnnnnnnnnnnnnnnnnnnnnnnnnnnnnnnnnnnnnnnnnnnnnnnnnnnnnnnnnnnnnnnnnnnnnnnnnnnnnnnnnnnnnnnnnnnnnnnnnnnnnnnnnnnnnnnnnnnnnnnnnnnnnnnnnnnnnnnnnnnnnnnnnnnnnnnnnnnnnnnnnnnnnnnnnnnnnnnnnnnnnnnnnnnnnnnnnnnnnnnnnnnnnnnnnnnnnnnnnnnnnnnnnnnnnnnnnnnnnnnnnnnnnnnnnnnnnnnnnnnnnnnnnnnnnnnnnnnnnnnnnnnnnnnnnnnnnnnnnnnnnnnnnnnnnnnnnnnnnnnnnnnnnnnnnnnnnnnnnnnnnnnnnnnnnnnnnnnnnnnnnnnnnnnnnnnnnnnnnnnnnnnnnnnnnnnnnnnnnnnnnnnnnnnnnnnnnnnnnnnnnnnnnnnnnnnnnnnnnnnnnnnnnnnnnnnnnnnnnnnnnnnnnnnnnnnnnnnnnnnnnnnnnnnnnnnnnnnnnnnnnnnnnnnnnnnnnnnnnnnnnnnnnnnnnnnnnnnnnnnnnnnnnnnnnnnnnnnnnnnnnnnnnnnnnnnnnnnnnnnnnnnnnnnnnnnnnnnnnnnnnnnnnnnnnnnnnnnnnnnnnnnnnnnnnnnnnnnnnnnnnnnnnnnnnnnnnnnnnnnnnnnnnnnnnnnnnnnnnnnnnnnnnnnnnnnnnnnnnnnnnnnnnnnnnnnnnnnnnnnnnnnnnnnnnnnnnnnnnnnnnnnnnnnnnnnnnnnnnnnnnnnnnnnnnnnnnnnnnnnnnnnnnnnnnnnnnnnnnnnnnnnnnnnnnnnnnnnnnnnnnnnnnnnnnnnnnnnnnnnnnnnnnnnnnnnnnnnnnnnnnnnnnnnnnnnnnnnnnnnnnnnnnnnnnnnnnnnnnnnnnnnnnnnnnnnnnnnnnnnnnnnnnnnnnnnnnnnnnnnnnnnnnnnnnnnnnnnnnnnnnnnnnnnnnnnnnnnnnnnnnnnnnnnnnnnnnnnnnnnnnnnnnnnnnnnnnnnnnnnnnnnnnnnnnnnnnnnnnnnnnnnnnnnnnnnnnnnnnnnnnnnnnnnnnnnnnnnnnnnnnnnnnnnnnnnnnnnnnnnnnnnnnnnnnnnnnnnnnnnnnnnnnnnnnnnnnnnnnnnnnnnnnnnnnnnnnnnnnnnnnnnnnnnnnnnnnnnnnnnnnnnnnnnnnnnnnnnnnnnnnnnnnnnnnnnnnnnnnnnnnnnnnnnnnnnnnnnnnnnnnnnnnnnnnnnnnnnnnnnnnnnnnnnnnnnnnnnnnnnnnnnnnnnnnnnnnnnnnnnnnnnnnnnnnnnnnnnnnnnnnnnnnnnnnnnnnnnnnnnnnnnnnnnnnnnnnnnnnnnnnnnnnnnnnnnnnnnnnnnnnnnnnnnnnnnnnnnnnnnnnnnnnnnnnnnnnnnnnnnnnnnnnnnnnnnnnnnnnnnnnnnnnnnnnnnnnnnnnnnnnnnnnnnnnnnnnnnnnnnnnnnnnnnnnnnnnnnnnnnnnnnnnnnnnnnnnnnnnnnnnnnnnnnnnnnnnnnnnnnnnnnnnnnnnnnnnnnnnnnnnnnnnnnnnnnnnnnnnnnnnnnnnnnnnnnnnnnnnnnnnnnnnnnnnnnnnnnnnnnnnnnnnnnnnnnnnnnnnnnnnnnnnnnnnnnnnnnnnnnnnnnnnnnnnnnnnnnnnnnnnnnnnnnnnnnnnnnnnnnnnnnnnnnnnnnnnnnnnnnnnnnnnnnnnnnnnnnnnnnnnnnnnnnnnnnnnnnnnnnnnnnnnnnnnnnnnnnnnnnnnnnnnnnnnnnnnnnnnnnnnnnnnnnnnnnnnnnnnnnnnnnnnnnnnnnnnnnnnnnnnnnnnnnnnnnnnnnnnnnnnnnnnnnnnnnnnnnnnnnnnnnnnnnnnnnnnnnnnnnnnnnnnnnnnnnnnnnnnnnnnnnnnnnnnnnnnnnnnnnnnnnnnnnnnnnnnnnnnnnnnnnnnnnnnnnnnnnnnnnnnnnnnnnnnnnnnnnnnnnnnnnnnnnnnnnnnnnnnnnnnnnnnnnnnnnnnnnnnnnnnnnnnnnnnnnnnnnnnnnnnnnnnnnnnnnnnnnnnnnnnnnnnnnnnnnnnnnnnnnnnnnnnnnnnnnnnnnnnnnnnnnnnnnnnnnnnnnnnnnnnnnnnnnnnnnnnnnnnnnnnnnnnnnnnnnnnnnnnnnnnnnnnnnnnnnnnnnnnnnnnnnnnnnnnnnnnnnnnnnnnnnnnnnnnnnnnnnnnnnnnnnnnnnnnnnnnnnnnnnnnnnnnnnnnnnnnnnnnnnnnnnnnnnnnnnnnnnnnnnnnnnnnnnnnnnnnnnnnnnnnnnnnnnnnnnnnnnnnnnnnnnnnnnnnnnnnnnnnnnnnnnnnnnnnnnnnnnnnnnnnnnnnnnnnnnnnnnnnnnnnnnnnnnnnnnnnnnnnnnnnnnnnnnnnnnnnnnnnnnnnnnnnnnnnnnnnnnnnnnnnnnnnnnnnnnnnnnnnnnnnnnnnnnnnnnnnnnnnnnnnnnnnnnnnnnnnnnnnnnnnnnnnnnnnnnnnnnnnnnnnnnnnnnnnnnnnnnnnnnnnnnnnnnnnnnnnnnnnnnnnnnnnnnnnnnnnnnnnnnnnnnnnnnnnnnnnnnnnnnnnnnnnnnnnnnnnnnnnnnnnnnnnnnnnnnnnnnnnnnnnnnnnnnnnnnnnnnnnnnnnnnnnnnnnnnnnnnnnnnnnnnnnnnnnnnnnnnnnnnnnnnnnnnnnnnnnnnnnnnnnnnnnnnnnnnnnnnnnnnnnnnnnnnnnnnnnnnnnnnnnnnnnnnnnnnnnnnnnnnnnnnnnnnnnnnnnnnnnnnnnnnnnnnnnnnnnnnnnnnnnnnnnnnnnnnnnnnnnnnnnnnnnnnnnnnnnnnnnnnnnnnnnnnnnnnnnnnnnnnnnnnnnnnnnnnnnnnnnnnnnnnnnnnnnnnnnnnnnnnnnnnnnnnnnnnnnnnnnnnnnnnnnnnnnnnnnnnnnnnnnnnnnnnnnnnnnnnnnnnnnnnnnnnnnnnnnnnnnnnnnnnnnnnnnnnnnnnnnnnnnnnnnnnnnnnnnnnnnnnnnnnnnnnnnnnnnnnnnnnnnnnnnnnnnnnnnnnnnnnnnnnnnnnnnnnnnnnnnnnnnnnnnnnnnnnnnnnnnnnnnnnnnnnnnnnnnnnnnnnnnnnnnnnnnnnnnnnnnnnnnnnnnnnnnnnnnnnnnnnnnnnnnnnnnnnnnnnnnnnnnnnnnnnnnnnnnnnnnnnnnnnnnnnnnnnnnnnnnnnnnnnnnnnnnnnnnnnnnnnnnnnnnnnnnnnnnnnnnnnnnnnnnnnnnnnnnnnnnnnnnnnnnnnnnnnnnnnnnnnnnnnnnnnnnnnnnnnnnnnnnnnnnnnnnnnnnnnnnnnnnnnnnnnnnnnnnnnnnnnnnnnnnnnnnnnnnnnnnnnnnnnnnnnnnnnnnnnnnnnnnnnnnnnnnnnnnnnnnnnnnnnnnnnnnnnnnnnnnnnnnnnnnnnnnnnnnnnnnnnnnnnnnnnnnnnnnnnnnnnnnnnnnnnnnnnnnnnnnnnnnnnnnnnnnnnnnnnnnnnnnnnnnnnnnnnnnnnnnnnnnnnnnnnnnnnnnnnnnnnnnnnnnnnnnnnnnnnnnnnnnnnnnnnnnnnnnnnnnnnnnnnnnnnnnnnnnnnnnnnnnnnnnnnnnnnnnnnnnnnnnnnnnnnnnnnnnnnnnnnnnnnnnnnnnnnnnnnnnnnnnnnnnnnnnnnnnnnnnnnnnnnnnnnnnnnnnnnnnnnnnnnnnnnnnnnnnnnnnnnnnnnnnnnnnnnnnnnnnnnnnnnnnnnnnnnnnnnnnnnnnnnnnnnnnnnnnnnnnnnnnnnnnnnnnnnnnnnnnnnnnnnnnnnnnnnnnnnnnnnnnnnnnnnnnnnnnnnnnnnnnnnnnnnnnnnnnnnnnnnnnnnnnnnnnnnnnnnnnnnnnnnnnnnnnnnnnnnnnnnnnnnnnnnnnnnnnnnnnnnnnnnnnnnnnnnnnnnnnnnnnnnnnnnnnnnnnnnnnnnnnnnnnnnnnnnnnnnnnnnnnnnnnnnnnnnnnnnnnnnnnnnnnnnnnnnnnnnnnnnnnnnnnnnnnnnnnnnnnnnnnnnnnnnnnnnnnnnnnnnnnnnnnnnnnnnnnnnnnnnnnnnnnnnnnnnnnnnnnnnnnnnnnnnnnnnnnnnnnnnnnnnnnnnnnnnnnnnnnnnnnnnnnnnnnnnnnnnnnnnnnnnnnnnnnnnnnnnnnnnnnnnnnnnnnnnnnnnnnnnnnnnnnnnnnnnnnnnnnnnnnnnnnnnnnnnnnnnnnnnnnnnnnnnnnnnnnnnnnnnnnnnnnnnnnnnnnnnnnnnnnnnnnnnnnnnnnnnnnnnnnnnnnnnnnnnnnnnnnnnnnnnnnnnnnnnnnnnnnnnnnnnnnnnnnnnnnnnnnnnnnnnnnnnnnnnnnnnnnnnnnnnnnnnnnnnnnnnnnnnnnnnnnnnnnnnnnnnnnnnnnnnnnnnnnnnnnnnnnnnnnnnnnnnnnnnnnnnnnnnnnnnnnnnnnnnnnnnnnnnnnnnnnnnnnnnnnnnnnnnnnnnnnnnnnnnnnnnnnnnnnnnnnnnnnnnnnnnnnnnnnnnnnnnnnnnnnnnnnnnnnnnnnnnnnnnnnnnnnnnnnnnnnnnnnnnnnnnnnnnnnnnnnnnnnnnnnnnnnnnnnnnnnnnnnnnnnnnnnnnnnnnnnnnnnnnnnnnnnnnnnnnnnnnnnnnnnnnnnnnnnnnnnnnnnnnnnnnnnnnnnnnnnnnnnnnnnnnnnnnnnnnnnnnnnnnnnnnnnnnnnnnnnnnnnnnnnnnnnnnnnnnnnnnnnnnnnnnnnnnnnnnnnnnnnnnnnnnnnnnnnnnnnnnnnnnnnnnnnnnnnnnnnnnnnnnnnnnnnnnnnnnnnnnnnnnnnnnnnnnnnnnnnnnnnnnnnnnnnnnnnnnnnnnnnnnnnnnnnnnnnnnnnnnnnnnnnnnnnnnnnnnnnnnnnnnnnnnnnnnnnnnnnnnnnnnnnnnnnnnnnnnnnnnnnnnnnnnnnnnnnnnnnnnnnnnnnnnnnnnnnnnnnnnnnnnnnnnnnnnnnnnnnnnnnnnnnnnnnnnnnnnnnnnnnnnnnnnnnnnnnnnnnnnnnnnnnnnnnnnnnnnnnnnnnnnnnnnnnnnnnnnnnnnnnnnnnnnnnnnnnnnnnnnnnnnnnnnnnnnnnnnnnnnnnnnnnnnnnnnnnnnnnnnnnnnnnnnnnnnnnnnnnnnnnnnnnnnnnnnnnnnnnnnnnnnnnnnnnnnnnnnnnnnnnnnnnnnnnnnnnnnnnnnnnnnnnnnnnnnnnnnnnnnnnnnnnnnnnnnnnnnnnnnnnnnnnnnnnnnnnnnnnnnnnnnnnnnnnnnnnnnnnnnnnnnnnnnnnnnnnnnnnnnnnnnnnnnnnnnnnnnnnnnnnnnnnnnnnnnnnnnnnnnnnnnnnnnnnnnnnnnnnnnnnnnnnnnnnnnnnnnnnnnnnnnnnnnnnnnnnnnnnnnnnnnnnnnnnnnnnnnnnnnnnnnnnnnnnnnnnnnnnnnnnnnnnnnnnnnnnnnnnnnnnnnnnnnnnnnnnnnnnnnnnnnnnnnnnnnnnnnnnnnnnnnnnnnnnnnnnnnnnnnnnnnnnnnnnnnnnnnnnnnnnnnnnnnnnnnnnnnnnnnnnnnnnnnnnnnnnnnnnnnnnnnnnnnnnnnnnnnnnnnnnnnnnnnnnnnnnnnnnnnnnnnnnnnnnnnnnnnnnnnnnnnnnnnnnnnnnnnnnnnnnnnnnnnnnnnnnnnnnnnnnnnnnnnnnnnnnnnnnnnnnnnnnnnnnnnnnnnnnnnnnnnnnnnnnnnnnnnnnnnnnnnnnnnnnnnnnnnnnnnnnnnnnnnnnnnnnnnnnnnnnnnnnnnnnnnnnnnnnnnnnnnnnnnnnnnnnnnnnnnnnnnnnnnnnnnnnnnnnnnnnnnnnnnnnnnnnnnnnnnnnnnnnnnnnnnnnnnnnnnnnnnnnnnnnnnnnnnnnnnnnnnnnnnnnnnnnnnnnnnnnnnnnnnnnnnnnnnnnnnnnnnnnnnnnnnnnnnnnnnnnnnnnnnnnnnnnnnnnnnnnnnnnnnnnnnnnnnnnnnnnnnnnnnnnnnnnnnnnnnnnnnnnnnnnnnnnnnnnnnnnnnnnnnnnnnnnnnnnnnnnnnnnnnnnnnnnnnnnnnnnnnnnnnnnnnnnnnnnnnnnnnnnnnnnnnnnnnnnnnnnnnnnnnnnnnnnnnnnnnnnnnnnnnnnnnnnnnnnnnnnnnnnnnnnnnnnnnnnnnnnnnnnnnnnnnnnnnnnnnnnnnnnnnnnnnnnnnnnnnnnnnnnnnnnnnnnnnnnnnnnnnnnnnnnnnnnnnnnnnnnnnnnnnnnnnnnnnnnnnnnnnnnnnnnnnnnnnnnnnnnnnnnnnnnnnnnnnnnnnnnnnnnnnnnnnnnnnnnnnnnnnnnnnnnnnnnnnnnnnnnnnnnnnnnnnnnnnnnnnnnnnnnnnnnnnnnnnnnnnnnnnnnnnnnnnnnnnnnnnnnnnnnnnnnnnnnnnnnnnnnnnnnnnnnnnnnnnnnnnnnnnnnnnnnnnnnnnnnnnnnnnnnnnnnnnnnnnnnnnnnnnnnnnnnnnnnnnnnnnnnnnnnnnnnnnnnnnnnnnnnnnnnnnnnnnnnnnnnnnnnnnnnnnnnnnnnnnnnnnnnnnnnnnnnnnnnnnnnnnnnnnnnnnnnnnnnnnnnnnnnnnnnnnnnnnnnnnnnnnnnnnnnnnnnnnnnnnnnnnnnnnnnnnnnnnnnnnnnnnnnnnnnnnnnnnnnnnnnnnnnnnnnnnnnnnnnnnnnnnnnnnnnnnnnnnnnnnnnnnnnnnnnnnnnnnnnnnnnnnnnnnnnnnnnnnnnnnnnnnnnnnnnnnnnnnnnnnnnnnnnnnnnnnnnnnnnnnnnnnnnnnnnnnnnnnnnnnnnnnnnnnnnnnnnnnnnnnnnnnnnnnnnnnnnnnnnnnnnnnnnnnnnnnnnnnnnnnnnnnnnnnnnnnnnnnnnnnnnnnnnnnnnnnnnnnnnnnnnnnnnnnnnnnnnnnnnnnnnnnnnnnnnnnnnnnnnnnnnnnnnnnnnnnnnnnnnnnnnnnnnnnnnnnnnnnnnnnnnnnnnnnnnnnnnnnnnnnnnnnnnnnnnnnnnnnnnnnnnnnnnnnnnnnnnnnnnnnnnnnnnnnnnnnnnnnnnnnnnnnnnnnnnnnnnnnnnnnnnnnnnnnnnnnnnnnnnnnnnnnnnnnnnnnnnnnnnnnnnnnnnnnnnnnnnnnnnnnnnnnnnnnnnnnnnnnnnnnnnnnnnnnnnnnnnnnnnnnnnnnnnnnnnnnnnnnnnnnnnnnnnnnnnnnnnnnnnnnnnnnnnnnnnnnnnnnnnnnnnnnnnnnnnnnnnnnnnnnnnnnnnnnnnnnnnnnnnnnnnnnnnnnnnnnnnnnnnnnnnnnnnnnnnnnnnnnnnnnnnnnnnnnnnnnnnnnnnnnnnnnnnnnnnnnnnnnnnnnnnnnnnnnnnnnnnnnnnnnnnnnnnnnnnnnnnnnnnnnnnnnnnnnnnnnnnnnnnnnnnnnnnnnnnnnnnnnnnnnnnnnnnnnnnnnnnnnnnnnnnnnnnnnnnnnnnnnnnnnnnnnnnnnnnnnnnnnnnnnnnnnnnnnnnnnnnnnnnnnnnnnnnnnnnnnnnnnnnnnnnnnnnnnnnnnnnnnnnnnnnnnnnnnnnnnnnnnnnnnnnnnnnnnnnnnnnnnnnnnnnnnnnnnnnnnnnnnnnnnnnnnnnnnnnnnnnnnnnnnnnnnnnnnnnnnnnnnnnnnnnnnnnnnnnnnnnnnnnnnnnnnnnnnnnnnnnnnnnnnnnnnnnnnnnnnnnnnnnnnnnnnnnnnnnnnnnnnnnnnnnnnnnnnnnnnnnnnnnnnnnnnnnnnnnnnnnnnnnnnnnnnnnnnnnnnnnnnnnnnnnnnnnnnnnnnnnnnnnnnnnnnnnnnnnnnnnnnnnnnnnnnnnnnnnnnnnnnnnnnnnnnnnnnnnnnnnnnnnnnnnnnnnnnnnnnnnnnnnnnnnnnnnnnnnnnnnnnnnnnnnnnnnnnnnnnnnnnnnnnnnnnnnnnnnnnnnnnnnnnnnnnnnnnnnnnnnnnnnnnnnnnnnnnnnnnnnnnnnnnnnnnnnnnnnnnnnnnnnnnnnnnnnnnnnnnnnnnnnnnnnnnnnnnnnnnnnnnnnnnnnnnnnnnnnnnnnnnnnnnnnnnnnnnnnnnnnnnnnnnnnnnnnnnnnnnnnnnnnnnnnnnnnnnnnnnnnnnnnnnnnnnnnnnnnnnnnnnnnnnnnnnnnnnnnnnnnnnnnnnnnnnnnnnnnnnnnnnnnnnnnnnnnnnnnnnnnnnnnnnnnnnnnnnnnnnnnnnnnnnnnnnnnnnnnnnnnnnnnnnnnnnnnnnnnnnnnnnnnnnnnnnnnnnnnnnnnnnnnnnnnnnnnnnnnnnnnnnnnnnnnnnnnnnnnnnnnnnnnnnnnnnnnnnnnnnnnnnnnnnnnnnnnnnnnnnnnnnnnnnnnnnnnnnnnnnnnnnnnnnnnnnnnnnnnnnnnnnnnnnnnnnnnnnnnnnnnnnnnnnnnnnnnnnnnnnnnnnnnnnnnnnnnnnnnnnnnnnnnnnnnnnnnnnnnnnnnnnnnnnnnnnnnnnnnnnnnnnnnnnnnnnnnnnnnnnnnnnnnnnnnnnnnnnnnnnnnnnnnnnnnnnnnnnnnnnnnnnnnnnnnnnnnnnnnnnnnnnnnnnnnnnnnnnnnnnnnnnnnnnnnnnnnnnnnnnnnnnnnnnnnnnnnnnnnnnnnnnnnnnnnnnnnnnnnnnnnnnnnnnnnnnnnnnnnnnnnnnnnnnnnnnnnnnnnnnnnnnnnnnnnnnnnnnnnnnnnnnnnnnnnnnnnnnnnnnnnnnnnnnnnnnnnnnnnnnnnnnnnnnnnnnnnnnnnnnnnnnnnnnnnnnnnnnnnnnnnnnnnnnnnnnnnnnnnnnnnnnnnnnnnnnnnnnnnnnnnnnnnnnnnnnnnnnnnnnnnnnnnnnnnnnnnnnnnnnnnnnnnnnnnnnnnnnnnnnnnnnnnnnnnnnnnnnnnnnnnnnnnnnnnnnnnnnnnnnnnnnnnnnnnnnnnnnnnnnnnnnnnnnnnnnnnnnnnnnnnnnnnnnnnnnnnnnnnnnnnnnnnnnnnnnnnnnnnnnnnnnnnnnnnnnnnnnnnnnnnnnnnnnnnnnnnnnnnnnnnnnnnnnnnnnnnnnnnnnnnnnnnnnnnnnnnnnnnnnnnnnnnnnnnnnnnnnnnnnnnnnnnnnnnnnnnnnnnnnnnnnnnnnnnnnnnnnnnnnnnnnnnnnnnnnnnnnnnnnnnnnnnnnnnnnnnnnnnnnnnnnnnnnnnnnnnnnnnnnnnnnnnnnnnnnnnnnnnnnnnnnnnnnnnnnnnnnnnnnnnnnnnnnnnnnnnnnnnnnnnnnnnnnnnnnnnnnnnnnnnnnnnnnnnnnnnnnnnnnnnnnnnnnnnnnnnnnnnnnnnnnnnnnnnnnnnnnnnnnnnnnnnnnnnnnnnnnnnnnnnnnnnnnnnnnnnnnnnnnnnnnnnnnnnnnnnnnnnnnnnnnnnnnnnnnnnnnnnnnnnnnnnnnnnnnnnnnnnnnnnnnnnnnnnnnnnnnnnnnnnnnnnnnnnnnnnnnnnnnnnnnnnnnnnnnnnnnnnnnnnnnnnnnnnnnnnnnnnnnnnnnnnnnnnnnnnnnnnnnnnnnnnnnnnnnnnnnnnnnnnnnnnnnnnnnnnnnnnnnnnnnnnnnnnnnnnnnnnnnnnnnnnnnnnnnnnnnnnnnnnnnnnnnnnnnnnnnnnnnnnnnnnnnnnnnnnnnnnnnnnnnnnnnnnnnnnnnnnnnnnnnnnnnnnnnnnnnnnnnnnnnnnnnnnnnnnnnnnnnnnnnnnnnnnnnnnnnnnnnnnnnnnnnnnnnnnnnnnnnnnnnnnnnnnnnnnnnnnnnnnnnnnnnnnnnnnnnnnnnnnnnnnnnnnnnnnnnnnnnnnnnnnnnnnnnnnnnnnnnnnnnnnnnnnnnnnnnnnnnnnnnnnnnnnnnnnnnnnnnnnnnnnnnnnnnnnnnnnnnnnnnnnnnnnnnnnnnnnnnnnnnnnnnnnnnnnnnnnnnnnnnnnnnnnnnnnnnnnnnnnnnnnnnnnnnnnnnnnnnnnnnnnnnnnnnnnnnnnnnnnnnnnnnnnnnnnnnnnnnnnnnnnnnnnnnnnnnnnnnnnnnnnnnnnnnnnnnnnnnnnnnnnnnnnnnnnnnnnnnnnnnnnnnnnnnnnnnnnnnnnnnnnnnnnnnnnnnnnnnnnnnnnnnnnnnnnnnnnnnnnnnnnnnnnnnnnnnnnnnnnnnnnnnnnnnnnnnnnnnnnnnnnnnnnnnnnnnnnnnnnnnnnnnnnnnnnnnnnnnnnnnnnnnnnnnnnnnnnnnnnnnnnnnnnnnnnnnnnnnnnnnnnnnnnnnnnnnnnnnnnnnnnnnnnnnnnnnnnnnnnnnnnnnnnnnnnnnnnnnnnnnnnnnnnnnnnnnnnnnnnnnnnnnnnnnnnnnnnnnnnnnnnnnnnnnnnnnnnnnnnnnnnnnnnnnnnnnnnnnnnnnnnnnnnnnnnnnnnnnnnnnnnnnnnnnnnnnnnnnnnnnnnnnnnnnnnnnnnnnnnnnnnnnnnnnnnnnnnnnnnnnnnnnnnnnnnnnnnnnnnnnnnnnnnnnnnnnnnnnnnnnnnnnnnnnnnnnnnnnnnnnnnnnnnnnnnnnnnnnnnnnnnnnnnnnnnnnnnnnnnnnnnnnnnnnnnnnnnnnnnnnnnnnnnnnnnnnnnnnnnnnnnnnnnnnnnnnnnnnnnnnnnnnnnnnnnnnnnnnnnnnnnnnnnnnnnnnnnnnnnnnnnnnnnnnnnnnnnnnnnnnnnnnnnnnnnnnnnnnnnnnnnnnnnnnnnnnnnnnnnnnnnnnnnnnnnnnnnnnnnnnnnnnnnnnnnnnnnnnnnnnnnnnnnnnnnnnnnnnnnnnnnnnnnnnnnnnnnnnnnnnnnnnnnnnnnnnnnnnnnnnnnnnnnnnnnnnnnnnnnnnnnnnnnnnnnnnnnnnnnnnnnnnnnnnnnnnnnnnnnnnnnnnnnnnnnnnnnnnnnnnnnnnnnnnnnnnnnnnnnnnnnnnnnnnnnnnnnnnnnnnnnnnnnnnnnnnnnnnnnnnnnnnnnnnnnnnnnnnnnnnnnnnnnnnnnnnnnnnnnnnnnnnnnnnnnnnnnnnnnnnnnnnnnnnnnnnnnnnnnnnnnnnnnnnnnnnnnnnnnnnnnnnnnnnnnnnnnnnnnnnnnnnnnnnnnnnnnnnnnnnnnnnnnnnnnnnnnnnnnnnnnnnnnnnnnnnnnnnnnnnnnnnnnnnnnnnnnnnnnnnnnnnnnnnnnnnnnnnnnnnnnnnnnnnnnnnnnnnnnnnnnnnnnnnnnnnnnnnnnnnnnnnnnnnnnnnnnnnnnnnnnnnnnnnnnnnnnnnnnnnnnnnnnnnnnnnnnnnnnnnnnnnnnnnnnnnnnnnnnnnnnnnnnnnnnnnnnnnnnnnnnnnnnnnnnnnnnnnnnnnnnnnnnnnnnnnnnnnnnnnnnnnnnnnnnnnnnnnnnnnnnnnnnnnnnnnnnnnnnnnnnnnnnnnnnnnnnnnnnnnnnnnnnnnnnnnnnnnnnnnnnnnnnnnnnnnnnnnnnnnnnnnnnnnnnnnnnnnnnnnnnnnnnnnnnnnnnnnnnnnnnnnnnnnnnnnnnnnnnnnnnnnnnnnnnnnnnnnnnnnnnnnnnnnnnnnnnnnnnnnnnnnnnnnnnnnnnnnnnnnnnnnnnnnnnnnnnnnnnnnnnnnnnnnnnnnnnnnnnnnnnnnnnnnnnnnnnnnnnnnnnnnnnnnnnnnnnnnnnnnnnnnnnnnnnnnnnnnnnnnnnnnnnnnnnnnnnnnnnnnnnnnnnnnnnnnnnnnnnnnnnnnnnnnnnnnnnnnnnnnnnnnnnnnnnnnnnnnnnnnnnnnnnnnnnnnnnnnnnnnnnnnnnnnnnnnnnnnnnnnnnnnnnnnnnnnnnnnnnnnnnnnnnnnnnnnnnnnnnnnnnnnnnnnnnnnnnnnnnnnnnnnnnnnnnnnnnnnnnnnnnnnnnnnnnnnnnnnnnnnnnnnnnnnnnnnnnnnnnnnnnnnnnnnnnnnnnnnnnnnnnnnnnnnnnnnnnnnnnnnnnnnnnnnnnnnnnnnnnnnnnnnnnnnnnnnnnnnnnnnnnnnnnnnnnnnnnnnnnnnnnnnnnnnnnnnnnnnnnnnnnnnnnnnnnnnnnnnnnnnnnnnnnnnnnnnnnnnnnnnnnnnnnnnnnnnnnnnnnnnnnnnnnnnnnnnnnnnnnnnnnnnnnnnnnnnnnnnnnnnnnnnnnnnnnnnnnnnnnnnnnnnnnnnnnnnnnnnnnnnnnnnnnnnnnnnnnnnnnnnnnnnnnnnnnnnnnnnnnnnnnnnnnnnnnnnnnnnnnnnnnnnnnnnnnnnnnnnnnnnnnnnnnnnnnnnnnnnnnnnnnnnnnnnnnnnnnnnnnnnnnnnnnnnnnnnnnnnnnnnnnnnnnnnnnnnnnnnnnnnnnnnnnnnnnnnnnnnnnnnnnnnnnnnnnnnnnnnnnnnnnnnnnnnnnnnnnnnnnnnnnnnnnnnnnnnnnnnnnnnnnnnnnnnnnnnnnnnnnnnnnnnnnnnnnnnnnnnnnnnnnnnnnnnnnnnnnnnnnnnnnnnnnnnnnnnnnnnnnnnnnnnnnnnnnnnnnnnnnnnnnnnnnnnnnnnnnnnnnnnnnnnnnnnnnnnnnnnnnnnnnnnnnnnnnnnnnnnnnnnnnnnnnnnnnnnnnnnnnnnnnnnnnnnnnnnnnnnnnnnnnnnnnnnnnnnnnnnnnnnnnnnnnnnnnnnnnnnnnnnnnnnnnnnnnnnnnnnnnnnnnnnnnnnnnnnnnnnnnnnnnnnnnnnnnnnnnnnnnnnnnnnnnnnnnnnnnnnnnnnnnnnnnnnnnnnnnnnnnnnnnnnnnnnnnnnnnnnnnnnnnnnnnnnnnnnnnnnnnnnnnnnnnnnnnnnnnnnnnnnnnnnnnnnnnnnnnnnnnnnnnnnnnnnnnnnnnnnnnnnnnnnnnnnnnnnnnnnnnnnnnnnnnnnnnnnnnnnnnnnnnnnnnnnnnnnnnnnnnnnnnnnnnnnnnnnnnnnnnnnnnnnnnnnnnnnnnnnnnnnnnnnnnnnnnnnnnnnnnnnnnnnnnnnnnnnnnnnnnnnnnnnnnnnnnnnnnnnnnnnnnnnnnnnnnnnnnnnnnnnnnnnnnnnnnnnnnnnnnnnnnnnnnnnnnnnnnnnnnnnnnnnnnnnnnnnnnnnnnnnnnnnnnnnnnnnnnnnnnnnnnnnnnnnnnnnnnnnnnnnnnnnnnnnnnnnnnnnnnnnnnnnnnnnnnnnnnnnnnnnnnnnnnnnnnnnnnnnnnnnnnnnnnnnnnnnnnnnnnnnnnnnnnnnnnnnnnnnnnnnnnnnnnnnnnnnnnnnnnnnnnnnnnnnnnnnnnnnnnnnnnnnnnnnnnnnnnnnnnnnnnnnnnnnnnnnnnnnnnnnnnnnnnnnnnnnnnnnnnnnnnnnnnnnnnnnnnnnnnnnnnnnnnnnnnnnnnnnnnnnnnnnnnnnnnnnnnnnnnnnnnnnnnnnnnnnnnnnnnnnnnnnnnnnnnnnnnnnnnnnnnnnnnnnnnnnnnnnnnnnnnnnnnnnnnnnnnnnnnnnnnnnnnnnnnnnnnnnnnnnnnnnnnnnnnnnnnnnnnnnnnnnnnnnnnnnnnnnnnnnnnnnnnnnnnnnnnnnnnnnnnnnnnnnnnnnnnnnnnnnnnnnnnnnnnnnnnnnnnnnnnnnnnnnnnnnnnnnnnnnnnnnnnnnnnnnnnnnnnnnnnnnnnnnnnnnnnnnnnnnnnnnnnnnnnnnnnnnnnnnnnnnnnnnnnnnnnnnnnnnnnnnnnnnnnnnnnnnnnnnnnnnnnnnnnnnnnnnnnnnnnnnnnnnnnnnnnnnnnnnnnnnnnnnnnnnnnnnnnnnnnnnnnnnnnnnnnnnnnnnnnnnnnnnnnnnnnnnnnnnnnnnnnnnnnnnnnnnnnnnnnnnnnnnnnnnnnnnnnnnnnnnnnnnnnnnnnnnnnnnnnnnnnnnnnnnnnnnnnnnnnnngatcttcctccaaagaaattgtagttttcttctggcttagaggtagatcatcttggtccaatcagactgaaatgccttgaggctagatttcagtctttgtggcagctggtgaatttctagtttgccttttcagctagggattagctttttaggggtcccaatgcctagggagatttctaggtcctctgttccttgctgacctccaattttgtctatccttttgctgagaggtctgcttaacttccttttagtcaggtagctccattttatgctaagcttcttagttgctcaccttctgcagctaaagaatcagaaaatgctgtgaaggaaaaacaaaatgaaattgcattgtttctaccggccctttatcaagccctggccaccatgatagtcatgaattccaattgttgtctatgcaggcctaccagatttctaacatctctgagctaccattttcttcttagctatctgctcagcaaatgtatccaaatgaaaggctgtggagaatgttgaaatcacttcaatgtgtttctcttctttctgggagcttacacactcaagttctggatgctttgattgctatcagaagccgttaaatagctacttatttttaattaattttacccagctttcataattgttcttgccaggtgggatggcctgatacaaattaacttgtcatagctagaattagaagaggaaaactttaaatagcattgagttatcagtactttcatgtcttgatacatttcttcttgaaaatgttcatgcttgctgatttgtctgtttgttgagaggagaatgttcagaattttatatcttcaacatctttttcttcattaataagatactgagattttataactcttgtcattttggtcacttatattttcatatggaaatatcgtataatccagggtttccaatatatttgtgtaaaattaagaaaattatcttatctaataacttgatcaatatctgtgattatattttcattgccttccaattttaatatttgttctctattccttcttaatctggattgaagttctgattaattattttaatgttgcaaattgttttcactttttccataaaatgagttctagagtttatttctttactgcatcattctattttcaagtcatgaacttctgcttcaactaaaaaaaaaaaactcaccgtttgtatgaaattgttgtgttcatattttattttttatttactgtataattcagtattgaatatataatattataaaatatgtaataaaaggataaaaaataagatacaaaaagtaaggggtgtgcgtttggaaaattatacttgctgatatggtgaaataactctgaccaaactaaccttccagcaataaaaacaaatttggaaaactggaaaaaatatacatggcaacatgttaggtcatctttgtctgccttcaaacaactataaatattgttctacccaaacaactataaattttgtaatacctagaacaatataaatattgttctacattgtaaattgttctacaatttacaatggtgtaaactgttatacaccatttatttgagtaaattttgaaaatatctattcttcatttttgctgtttctcgtgtggtatatatttctcagataaaagatattttcccttttatctttccctaagctcacactacatatattgcatttatcttatatctgctttaaaacctatttatgtctttttaggtcacttacatcagaggagttgtattggtgcaggaaggggagtttgatttaatgaaacaatgcattaaaaatttgtattcactttgtgattcaatgatagtcaatgtggcatgtaatttttttctgtcttttaatattatattgtctttgttgcttttctctaacatgaaatatatgttacacaggcacagtgctggtatcttttctattattatctttgaatgggactcattattttctgagctatttattaaaatggtgaaggaaaagatcagtaaagtaaattatgtcaataggcagtatcaatttaggtctattttccatgaatattttctcagcaactgtggtgttatgatatatattggttttcatccacagttcctggcttataactcccctagcacttgttacagtcttttgttataatattgggtgtattaggcctcaggagcaggcctctcaccttctcatggccttttttcatttttatgttcctgcctttctggttgtgggtcttaagaccatctcaagagagagtcccaccctataccctggagggaggaatgctgatatcatgaaacttccataaaaatccaggaggacagggttcagtgagcttctgggtagttgaacacatggatgttcctgtagggtggcccgcccagggatggcatggaagctctgctcccttcccctatgaattgctctaagtgtccttcatctatatcctttgcaatgtcctttataaaacaccaggaaatgtaagtgtttccctgagttctgtgagccactccaacaaattaatcaaacccaaagagggggtcctgagaagccaactcgaagccagcaggtcagaagttcagaggcctggacttctggctggtagtttgagggtgggcagtcttggggactgacctgtgagacctgacactatctccaggtagatagtgtagtgtcagaactgaattagaggacactcagctggtgtccactccttggtgtatgtatggaggaaaaaactcacacatttggtcacagaagtcttttctgttgctgattgatctttgtggcatgagactagaggaaaaacagagagagttttctctacacagcaactatataatctgtgggaatatctccttttacacctagccctacttctgtctggctacagtcatttatctggctttgggaaatgtgaccacagaatcagatatatacatgagattaaataatacatgtgtatgtcatttaaatatctagaaaagttatgacttcaccaggtatgaaaaatataaaaagaactctgtcaagaatcatacagtaaatagatttttgaatttaatctagtacctaaataatcagagtagggaggttagatattaaaatcaggctaaagatataggcaacatggatctagaaaacatggattgcatggccatttcacttagagttcatgggcttggaatctctattaacataacttttacaatgttagaatttgttcccatattaatgagggaaaaacaaacaattaccctgagtatctgaagctccagatctcattttccagtcaaaatctctgataggtaaacaacctgaaaaagtagccacaactcactgaggtgataacctcatttgcttaagagaatgtaattgtttttatgattttttttatcccaggaaaacattgaaaaaaagtttagagatgatgaagtatatgaaaactataatatttatactttagagatgtgatatttatttataattgtattagtatttaaatatagattagcattttacattccaattttcaatgtgtaacagaatattttagatattggggttgttttttagttgaaataataagcggttttaccgagttgccagtagtggtttaacattgaagataatttaacattcatgattttgtgagtttaatttattagctctataagggttgtttaagtactctgaaggctttatttgttagtccgataattaaaatgttcataaagataattcaacatattaaatttgtaaatgtagtttaaaatctttaagggagtttaattaactaagttgtaaatggacaaaacattaatcaaagtcccccttaaaaataatttttaatgtactagatttataaatagaacaacaagatttctaatttaaactcaaaaattttttaaattggttaacaatttaacataatatgctgcacattaattcagaatatgaaatcttatatgtagtcctttttacattcaagaatcacatcgataaacatcacaaaatgactactggtaaccactatgaaactctttaagcggtaggtcctgtatgaattttactcctcatgatttgaagattatgcataaattccttcttcctgttattttgtttccaatttagtctttacatagacaattcaatttagtctttacatagacaaaactcctataacaaaaaaactgaaaacaaagagggtgcattcctttgcttgctttctgaggacaccctactctaaaaggcagtagctttcaataaactatgtcttcttctcattgtactctgtgactcaccttgaattctttcctgtgtgaggcccaaaaaccatctcttgaagtgtggatcgggacctctttttccagtaacactagtactgttataattaggtaaatgttactcacacctgaaacatggagcataaatgattgaatttcatgtctacacaacattttttccgttaaactgacaattttttaaaatttttgtttttttcatttttctatgtatgtatcaaagtaccaactccaaactctattccagttttctaatgagtctcataatgcattcagaagcattagacattttatcagatttatctttttgaaaatttttttctaaataactctaatttacacaggttgctgtgtacacaaactgtacatctaataatcaggagattccctgtactttataccctactctttcttcatttacttcctcatttcagtgaaactcttctccagaaattcctgagataggatgtattggatgtagagttttagaatcttgccatgctgtaaatgcttattattgtttcctcctatctgatttagtttggttggagatactattctgcattagaaataatttgttttgcaatttataaggctttgcttgttttctagtgaccatttatatttctcttctctggaaattttaagtctcttctttttttttttcctgagtgtgctggtgtgtgtgtgtgtgtgtgtgtgtgtgtgcgttggtctaggtctattttcaccactggcttgaattctcgtggatacattcaatctgaaattcatgcactttaactcttacccatttcaaaaaagtatttacatatatcatacttcattttacttttttcttttcccaaatgcctgtattttgttgctggccctataggaccaattatttaattcattaaactttccctttctcattcccaactctgtttacactaacttttctgcagatgcagtcagctttaccttccaaatctcccattaagttatatatttctgcaataaatttcttaatttttaagaattctatttttttgaatatccattttatatcacaccttgttcttattgtattatcttatcttccctctctgaggaaattaataattacttttttcccacactgcatagactctgtttactttcagttgttttgtttattttttgtttctgtgtttgttattggctgtacctagaatctcatgattgtttgttatctgtttgcgttcaagagcaatacaataaacatttatggtaagcttcagtttcttaggtaataattgtcaactgtggcttccagacagggcaatcaggtcgagaagttttcccagaaaagctcctcatgacatatccactggtctattcctttgggctgatcatgatcttccaactagagtcttccagtcttctctgaggatataagactaatagactgttgtgttttgaatctagatagaggtgaaaattggggagatctagctttcagtagttactgttcattttgcacccctaatttatgtatgaccattgaagatgatattgccagtactaagattccttgttacctctctagacagcaaatgtctacttttccaccagcagaacctagaggcattcatgcggcttgatggagtggacattggaaacagtctttcaaccaatcttcctgggttttagccctacctttacttctactttcagaggtatcccgtgcaaccaatttatgaacattttgtagaatcagatttccccgctacttacaattttacactttttgttaagctaagtcagttaccagccatttatggacttcctgttttcaaaaatgttgctgttttctttttatatcacttgaataagccatttgtcatcatgttatagtttcaggtgggaaaataagtctctctatgtgtttaatatgccatatttgctcaggtgcctgcatctactctcatcattttttgaagaaaggctaaattgtaatgacactaacaactagtcttcaaagtttggtttataatttttaatggtgtttatttttaacaaaattggtggagtttttttttctttgtatattgatttttcttttggttttcagttgttttaagaaataaatggagggagagatatgcttcctttgctcccattaaccaaaagaatagtttgaagaatgcaggaattaacttttccattaagtttaagagggcctgcttgagacacagctgggccttgagcttttaaaggtgctataactttacaccggtttcatttttttctattgttggtatcttcaaatgatctcatttctctagatttatttttatagttaaattttccctaaaaaattaacctcttcatatatattttcaaatataatgaccaaaaggtacatattacattcttttgaaattttcagttatccagttttccatttttcttgttatattttaatagtctctctcttttttgtcatctaatttgtttgtcctttcaaagaaataattttttgtatttattgaaaaattccattgctgttgggatgggagaagattaaatccttagaataataggccaggcatggtggctcacacctgtaatcccagcactttgggaggccgaggtgggtggatcacttgaggacaggggttcaaggccagcctggccgatatggtgaaaccccttctctactaaaaacacaaaaatacaaaaattagcaggtcatggtggcatgtgcctgtagtctcagctacttgagaaactgaggcacaagaaatcactcaaacccgggagatggaggttgtattgagccaagattgtgtcactgcactccagcctgggtgacagagcaacactctgtctcaaaaaaaacaaacaaacaaacaaaaacaaaacaaaacaaaaaagaactttaaataatagtatattataattttgcagattataagatcaatagatatttattgtaaaatgcacaaatagtgcaacatttcttaaagtagaccgtgaaatacttcatgttgccatgtttctccaagaggtactattgggccttcataagaagcaattcttccttatataggactgtttgtctcaatgcactgtttggcccaatgcatgctgcatgtgatctctaccctttacttgtaagtgcttgccatgtctccatcattgatacaaccaaaaataacctacatttccagaatcactccaaaggaatggtcctgagaaagagttgaaaattctgaactcctcagattagatctctattaaataattgaagcagtgtgctaactaatatttgcaaagctgttcattatacaagtttaaaaaaatgcaaagatagtaatgacttgaattttcaatagatatgttttataaaaatactggtaaaaattaacattttacagtcattttaaatgacggcaagatatccaatgtattttcaaatgaaatatcagttcactacaaatcataattagcataatctcatttttaaaaaagtacacatatgtgttttatgagtgagagtatttgagttctaattaaattgtcggtggatttctaaggaatagaggaaatgatgaggcaagtggaattgtagagagaggaagatttcaatttacatttaattcactcctggagtgtttgagtttttgtaataaaacattataaaatgtcatatcatttacagtatgatcacttataaactttcatttcaattaaaaggaaatttttaaaaagaggactaccaaataactactgcagccattgtagtttcataaatgactttttacttccttcatgttgtgttaatgtgtgcctgctaggtcaagacccagatttgacaccgtgtacagtcagtatataagtatcataacagaagattacctatctggataccctagcttctccattcctgagcaagttgggaggccatggggtccaactctctcaatatgtactaagcaaacagagatacttttgccaaaggatattcttcttgatggtaaaaatattagctaacatttgttagctgacaaaaatgaagtatattaaatatgttaagggaaactgtggttcaagtgatagagatttttaattctttttgagatcatgtaattatacccatgacaaggtaagtttgattcagaataatttctgccaaaataaaggatgctgttgatggcctgcttgtcccctgcctattgactattattctcaaactcaagcaaaattaatttttaaataacaggataagaaatatgagtaagctctgccttttgtgggtcaggttgaaagtatggaagaaattcagaaaggacatagtcaggaatagatgagaaaagaaaaatatatattattttggccattgatatggtttggctctgtgtccccacccaaacctcatcttgaattgtaatccccacatataaaggaaggaacctggtgggaggtgattggatcatggcagcagcttcccccatgctgttctcatgataatgagttaagttctcaagagatctgatgggtttataagtgtttgacagttcctccttcatatgcttactttctcccttgcctgccaccatagaagatgtgtctgcttctcctcccaccatcatggtaagtttcctgaggcctctccagcatgcagaactgtgagtcaattaaagcttttttcctttataaattacccagtctcaggaaagtcttttatgacagtgtgaaagcggactaatacagccatgagaaatgaataacggttaaatggtaggaagaagaaagaacattcttggcctagagagtacaaaaggaaagccatggggttggacctaaaaagaatacaaaggaagaggagagaagagtactaattgtgctcaggagctgaattgggaaattttttacaaaaccaagaaataccaaacttagtgaattattgtgggaccagtgaataaagaaatattaaagcaatgaaaaataatttaagtaaatatgagaagaaaaattaagaatatctgtatatttttgatcaaaggttgtaatgattaaagttacattataaattattctatctatggaattaattatgggtcaaaaagaatacaagtcagacaaactataaacttctctcattctttattttggaacttaaagaacttatgtatgtaagttaatcagacatttttacgttatttttacaaaagtacctatgcattaatttagaaagatttttattgtctgttttctataaaaataaagtgtaagattttattacttcagataacatttgctacaagtcaatctatgtcttccaagaaaatctcttggtcaggactcatacttctccaccatgtttcagatttgatttcttttcagagaggtaagatttgttgctgtgtctccttaaattgaaatagatgtaattaatgtggctatagtgagagtcgtcttcaatatagtaattgtgttctgaaacagtcatctgaaaatgaaatattttctcctctaactggagtttttcatttacaattaacttaaacttttagtctttacactggaaactcttctctaaagaagatatgactattttgttctcataaaagctagactcttggagaagacagaaagtgcaacggcaggaagattaatgtggatcctagaatccagaaagttgtctagagactatttaaaacggttactgcaagaaagctcaaaaagagagtaatcattcagaataggaagagatagaaatccttaaacaattaaaataacaataccaggtgtgtatagtcagagggagagattttgcctatattattctggggagagaaataaaatatttctgtataacatcatagaaatgtaaatggagatgttaaacttctctgatgggtagtttgagaaaaattttaaaaattgaaaagtttttttttttttttgagacggagtctcgctgtgtcatccaggctggagtgcagtggcgccatctcggctcactgcgagctcagcctcctggcttcatgctattctcctgcctcagcctctctagtagcgggactacaggcacccgccaccacgccaggctattttttttttatttttattagagacggggtttcaccttgttagtcaggatggtctcaatcttctgacctcgtgatccgcctgcctccacctcccaaagtgctgggaatacaggcgcaagccaccgcgcagggccaagactattgttttaaagtgtgaaaattgatattgaattcttgtgtttatataataagatgtcctataatttctgtttggaatataaaatcagcaactaatatgtattttcaaagcattataaatacagagtgctaagttacttcactgtgaaatgtagtcatataaagaacataataattatactggattatttttaaatgggctgtctaacattatattaaaaggtttcatcagtaattcattatatcaaaatgctccaggccaggcgtggtggcttatgcctgtaatcccagcactttgggaggtcgaagtgggcggatcacttgaggtcaggagttggagactagcctggccaacatgatgaaaccccgtctctaataataataataaaaaaaaattagctgggtgtggtggtgggcaactgtaatctcagctaatcaggaggctgaggcagaagaattgcttgaacgtggaaggcagagtttacagtgtgccaagatcacaccaccctactccaacttgggtgacagagcaagactcagtctcaaggaaaaaaaaaaagctcgaaaaatgtttgcttattttggtaaaattattcattgactatgctcagaaatcaagcaaactgtccatatttcattttttgaaattacatattaaggatctaaaacaaaggataaaatatctgcaaaaatatttgcatttctggataaattagtttcctgatttaactccttgttgacactgaatatattttaaattaaacaaggtgctgataagacaaaagacaaagaaagaaattcaaaataaaattgaaagatgaaatcagagcttaccagagataaaatttcctctgaaagtgtaaaagagatcttcatacaaaaatcagaatttatatagtctctttccaaaagaccataaaaccaatcagttaatagttgatttttatgtgaaaaaagaaactgtaaaagaaaaaataatgacaccaaaatcccttttaaattcaaagagtcataaagtttcaaaaaatgtaattcagataagaaattaatgtcagctacattcttccacagtaaaggtttgcatcaacttttcaactaatagctttagcattcattagaaaacttgtttcaaccattattttactaggtgttataacagggtactacattctttcatttttttcttcatttattagctggaataatttctaaaagaacatttcttcccaaatgtgtattgattacaccaaaacacagtttggacaggaaaaacaagataagtagacaaatgcttgatttttatacccctccccacttttcacagtaatgaattagtgcttcaacaaactttaatagtgattaaaaacttatttcccataataaaaattttaagtttttgtaagtaaatgataaataataatttatccagtatttcatgagtacctataaccagccaggatccattctccaacaatgtggggaaaggagccccgtttaaaattcctgtcaggataccagcaagatgatgaaatagaaagcctcaaagcccctccaccctcctctccaaggagacaccagctcaataataatacacagataaattcccttcgtgaaaagttcagaggagaatttaaagactctggattccctggtaggcttcaagccaggcacatcaaaaccagcaggtaaatttgttgcactcactcatactccctcagcagtacaacgcaatggagagaaagctccaaactcccagctcatctctagggagagaaagaaaagtctagaccatacatccaacattttgactttttgggagggcactagcacctatctaccctgaatctaagtgctaacaggaaaggatgccagattgcatgcctgctgataaagccacagtttggactgtcactcaatcaccatcgttcctcctgtgactcagtataacaagattgggagaatactctacagttcctgattcccccacagaagtgaaagagaatactgcaacacacattcagtgttcagacttcaggggagttgccaagtgattgttttctgtcttgcctgaatttaagcgttaacaggaaagctttccaggttggggatattaagaataaatgagttgaggaagtttgggttagcatacattcacttatcatatcatccttccctggatcaatatgcaatgagtgggacaaaaccctcaactcctggcttccccttggagaaggaaaaagctggagtgtgcatccagaatttcaacttttcccagtcagcctgatggactgttttctgtctgactggatactcttcatgtctgaggactgctgagaacaaaagagagctagggggttatagcaactccagataacctacagtactacagatagataacaaagagagcaagagattacatgctcctgaagaaagacctgcaaatttttctcagaatttacacacaatttcagagacaatacattcacagaaagatttgacacacttcagaatctctaactgggctgactggtgaaaggatttcccagtgcaaaaccagtctgtaaagacaaggagaagtggttatttttttcaaatcctagaataacaacacaaaattaaaaggcacacaaggaaacagggaaacatggcctaataaaaagaagaaaataagtttccaaatatcaacccttcaaaaatggaggtatataaattatctggcaaagtgacatatcctgacacattctccaggatagatcaaatgttaggtcacaaagagagtcttaacaaaattaagacaaaggaaatcaagaacctgttttgaccaaaagtaggatgaagcaaaaattcaatagtagaaggaaaacggaaacatttacaaatatatggaaattaaacaacatactattgaacaaccaatgagtcaaagaagaaatcaaaaagaatattagaaaacaagctgacaaaaaaataaaaaaacacaacatagcaaaacttagaaatgcagcaaaggcagtactaaagagggaaatttatagcaataaatgcctaccttaaaaaagaagaaagatctcaaataaacaacctaactttacaactcaaggaactaaaaaaaagaaccaagcccaaacccagcaaaaggaaggaaataataaaaattaagcaaataaaggatattttcacacacatattttcattataaccagaaagtagaaccaatgcaagtgaatagattaaaaaaaaactgtggtattactatacaatggaatatggcaattaaaaagagaaaagactcaaccaaataaaattaaaaatgaaaaagtagacattgcaattgatgccacagaaataaaaaagattattagagactgctgtgaattattatggtaataattggataacctagaaaaaaaacaaatgactggaaatatacaacaaacaacactgaatcaaaaagaaatacaaaatatgaacaaatctatagctagtaaggtgtttaaattagtaatcaaaaatcttccaacaaagaaaatctcaggtgcagatgactttactagagaattctgccaacatttaaggaagaattaatgccaatatttctcaaacattcctaaaaagttaaagaagaaagaactattctaaactctttttgtgaagctagtataaccctaatatcaaagccagacaatggtgctacaagaaaaaaaattaaatattcctaatgaatgtagatgcaaaatcctcaacaaataccagtaaattgaattcaacagcactataaagtatcatccaccataattatgatggatttgttcctggaatgcaagaagggttcaacatgtgcaaatcaatataatatgccacattaacaaaataattcaaataacgtgttcatctccgtagatggagaaagatcatttgatgaaattcaacattctctcgttagaaaaacacttgaaaaaataggaatagaaagaaattattccaacagaataaaggccatatgtaaaaacccacatttcacaccatattaatgaagaaaaactgaaatcttttcttctaagatcaggatcaggaacaaggcaaggacgcctttatgaagtacataaagtcctagctaaaataattcagcaagaaaaagatataaaggcatccaaattggaaaggaagaagtaagtaaaattttttctattcccagaaaacatcatcttatatattaaaaaaaccctaaagattcaacaaaaagctcttggaactaataaaattaattcagcaaagttgcaggattcaaagtaaagattcaaaaaaacacaaacagcaaacattctgaaaaggaaattaagaaaacaatccatttgcaatggcatcaaactgaataaaatactttggaataaacttagccggtgggggaaagacttgtacactgaatactgcaaaatattgctgaaagaaattaaggaagacacaaataaatggaaagccatctcatttttgtgaattcaaagaatatttttaaattctaatactagccaaagcaatttacagatttgatgtaatcccttggaattgtataaattccaatgataattttagagaaatagaaaggacaattctaaaatccatatggaaccacaacggaccctgaatatccaaaacaatcctaagaaagagaaacagttagaggcctcacattttctgactttgaaatatactacaaagctacagcaatcccaatagtgtgatattaatgtaaaactaatcatatagatgaatggaacagaatggattattggaacagaatagaaagcccactgggaggccaaggcgggcagatcacctaaggtcgggagttcaagaccagcctggctaacatggtgaaaccccgtctctatgaaaaaatacaaaaattagctgggcatggttatgggcacctgtaattccagctacttgggaggctgaggtaggagaatcgcttgaacccaggaggaagaggttgcagtgagccaagatcacaccactgcactcccgccttggttacagagcaagactccatctcaaaaagaaagaaagaaataagaaagaaagaaagaaagaaagaaagaaagaaagaaagaaagaaagaaagaaggaaggaaggaaggaaggaaggaaggaaggaaggaaggaaagcaagcccagaaataaacccacatgcatatagtcaaatgatctttgacgagggtgccaaaactatacaatggagaaaggataatttcttcaacaaatattgttgggaaaactggatatccatatgcaaaagaatgaaagtgaaccgttatcttaaaactgttcacaaatgttaactccaaatggattgaagacttaaatgtaagaactaaagctgtaaaactacaagaaaacataaagaaaggctttatcacattggtcgtggcaataattccttggatttgataccaaaagcacaggcaacaaaagcaaaaataggttagggtgattacatcaagataaaatgcttctgtgcaaaaaaggaaacaacagagtgaacaggcagcctatagaattggagaaaatatttgaaaaccgtatatgtgctaagggcttaatatccaaaatatataagaaacacctagaactcaaaagcaaataaacacataacccaattttaaaatggccaaattcttaaatagatatttttcaggaagacatgcaaatgaccaacagggatataaaaagatactcaacatcattaatcatcagggaaatgctaattaaaatcacaacgggatttatcacctcataactgtatgaccatttttaaaaaaagaaaatagcaagtgttgatgaagatgtggagaaattgaattagaaccttatgtactgtcagtaggaatgtaaaatggtagagccactatggaaaacagtatggagggtcctcaaaacattaaaaaatagacctaccatatgatgcagcagtcccacttgtgggcatttttccaaaataattgaataattccaaaataattgaaaacaagatcttgaagtgatatttgcattcccatattcgttacagaattattcacaatagccaaaaagtagaaacaatctaaaagtccatcatcaaatgaacagatgaagaaaatatggtatatgtgtgtgtgtgtatatatatatatatatatatatatatgtatggtatatatatgtatggtgtatatatatatgtatgatatatatagtatggcatatatatgtatggtgtatatatatatggtatatttatgtgtatatatatgtatatatgtatatatatgtatatatacatacacacacagaatggaatattagtcagccttcaaaaggaaaattctgtcgtatttcaacatgtatcaatcttaaggatattgtgctaagtgaaataagccagacacaaagacaaatatatcgtgattccatttatatgatgtattgaaagtagccaaacacatggaaacacaagataaaatggtagtggtcagggcctggaggaaacaggaaatctggagttgctgttcaccaggtgtagagtttcagtcaagcaagataaaaacattctagatttctgctgtacaacaatgtgtatatcattaacaaaatgttctgcaaacttaaaattttgttaagatggtagatttttttgttatgtgttttttaattacaaaaatttctgtctgtatttagtttacattttagtaagaaaagacaaataacctaataaatggtaatgataaatgctgtaaggatatctagagcaatgaaagaagttatggatatgggagtataattttagatagtgaagatttctgtattcaaatgccacatgcaaaaaggactaaggggaatgaggagatgagtcatatggaatgcccaagacacagaaaaaggcaggcagagaaaataacaaggataaagacactgaagtaaaatcatgctttctatgtttcaaaacagcagcaagtacactactgtgatagagcaggagtgaccaatgggaggctggagattttgtcagagatattgtcaaggctcaggatcgtacagggacttgtaagcctggaaagcactttgaattttattcagaatgagatgagaagccattgaaaagtttttaagcagatgagtaaaataatccaccttgtattttaagaggagcattctaccttctctgtggaatagagaggtggaagggaaagcttgaagcagagagagcagtgaagagtgtgctgtaatattcttatgtgagaaatagtggagggaatgagaggtggtcagccttaaactgccatttgctctctgtatcagggctcagggactttcagactctccagggattccttacagtttttacatttgtttctcagttgcaaacataatctcttcactctatgagaactctagatctgaatccttgttatgagtcaggagtcctctctagtttactctcttgtcagtaactagacttgaaatgttttgatattaattgatatagtaataagattggttagagaaatagcaaagagagagcatccccatcctatgaccatatcagcaccagaagagaaaaacacatctacacagtttttcccttggcataggtcctggtattctgttagggaacaggttatgaaggaaatacaaagggtctttgtacttactttcagaatgtattttctttaacatgaaaagaatccaaggcctttttgcttctaattgctttttgtgtatctactaccatcccttgctaaattattgataggtttcctcaaatctcggcatgatgtcctacattctaaattttcaatagctgaaaatttcaccttttcagtgccttcaagtttatctcagtaaaaagttgagaaagactgtaatagagttatttaatcagatttttttcatctaccataatttttgaataaggaaaaacagcaatactttttctccttacttggcaagtaattttcatagagaggaaaaaaacaatcaaaacaggtacaaaatgtaacaaaaccaaaggaccatgtgaggtgaaatttaaaatgagaaaaatgtccacagtactttgggcaatgcaactcctgggaaatagtaactcagcacctgagagctaaataattctacaggactaaatatatattctggtactcaaggggaaaatgacatcatatagagtttaggtctattaaaacatatttgtagatgtgtaggtatgaaaaatgcttttagagatgggaagagaaaaaaaactcatttgtttaacaagttctgatgggtgcttttcactaaaagagaaacatcataagtttataacactcaggatgtaaattgcggtacatttcaaattacatgagaaactaaagaaaatatctgtttcgggtcactgaataattcattcttatttagtgtttgtccctaatttctgtgattttatgaataattcagagcaatgattttacctttctctacagctgtatttggtaaatgtccacattatttttgttgcaaagatgcagccaagtttcttagaataggaacaatgtttagaatgtattttttccataatgaaaaatattatgaaaggggaaactaagatatagcttacagggttctctattgtgataactaaaacatacttagcctcaagtaaaactgacatcttgctaactgttggtggtgaaggagaaagaagacaacactgaaccagactggggaaagatgaattcaaattagttagagatttgtcacccaaagcaaaacaaattcaagcttgaactgagttgacattggtagttattatggactgcaaatccctcaaattcatatgatgaaatcctaactctcaatgtattggtattaggaggtaaacctttgggaggtaattaggtcatgaagatgaaaccctcatcaaaggaaagtagtgcccttctagaaagagatacaagagagatttttctctcctccatgtgaggataaaataagacagccatctgtaaaccaggaagacagccttcaccaagaacccaaccatgctgactccctgatttcagatttacagcctacggatctgtgaaaaacaaatgtttattgttttactcgctcaatctgtgttttccgttatagcagcccacattgactaagaaaatactaaaccctttatttgatagataaagatagtatcagacaaggtatcatatgagtaaaaacctaagatttatgtgtgatcattttacattggagcagctactgaaacttgagaccaaaaccactagctaacatcagtatgtcaacccaaaacatttgggacagtaatgaagatacagcaaatgaattgttttaatatataatcaaggcaaagttatcctcagaattataggaaaaaaatccactaaatttggcttttgagaaatgcatggttcattgtataccttgatactgggcttaaagcagcaatcctaattccagatctaccttcaagtctgggtcagtgttctcaaatgctgccagtttcatgtcaggaccggcttaatattgaaggtaactgagcattgctaatgtctgactggagctgaaagaggccaaaagcagggttataactttgggaaaactgacctggtgttaacttccacgccttccatttcaaacgggaaggtatcacaattagaagctattaacagtcttatctaataaattgtggataatttctttttttttctttttttttaagagtcagggtctcactctgtcacctaggctggagtgcagttgtgcaattgttacggaatctttggggtgtcgattttctggtttgaaaactgtggttggtggcatctttgtccgagttcttgtcctgcatccaggaagaatggtgtaggtagacaagtgaagggttaaaggagaggagctttattaagtgttagaacagctcagaggagacccatagtgggtagctcctctctaggttgttctgtcaagtgttcagctctcagcagaaagggaaaccctggagagggttgctcctgtctgcagctggtagttcccagacatctatgcaggtctctgaagcattcagcagagaaaatatctggccctcccattgtctccagctatcagcagaaaggatagctccttcctgcctctagtcttccctcctctgtcttctgccctgttctggctgagtcctgggcttttatggatgtcagaggggaggaaatgtatgcccgttggtccatgggcagccatgggcgggcccaggaaaaagcaccatgagttttgcctccagtctgcaggactggcagcctagcctgcaggtggggcttcactggggacccatcaccttccacccaggagcctgtctgcctcccacaaccatccatggcacccaggctgctggcatcaaggggcacttgcaggccagtgccaagccaccctcgtaccccctcatcttcccctcccatgctcctgctcctcagtgtccaaagtccagaaggggctgaggtggcaggggactggcatgtcagcactgcttccaatgtgtgcacacctggctgggcagtgacagcaccctgctgggtcccaaccccactctgagatcagagcacagagccaggaggtgggagagaccaggcagcaggaagaggtgcctccaagcctgcaaggggcaaggggggcgttcccaggctccccaagagtgcagggaggcctgagtctgcagcattggtttgggtggctgggtggtgggctagggtggggacagagtaggggagttggataaactcccgtctgctccatggagtgggaggtccaggtctacagctacagctgcagtttgggcagctgcagcagcatccagggagctcccattccaattcggaagggcagggctcccacttgtcctcatcctgccaaatccagggagcatacaaccctggccacacctctcccctgcagctggcatgatggcagcagccactgccatcacaatcacagcctattgtagcctcaaactcctgggcccaagtgatctttttacctcagtctccccaatggctggggccacaggcatgtgccacaatgcccatctaattgtttttttattttttgtagagaaggtggtctggctatattgcccaggttaatctctaattcctggatttaagcagtcttcctgcctcatcctcctacatggctgggattacaggcaagagcgactgtgcccagctcctgataaatcctttcttaatcaaagtcttcatcagcagccttacttaccacaatcttcccagatgatctcaagtatccaaggaaactaaaagtagctactgctgacaaaactgttgtgttccctgatattgtgcaagaataaaatgatgctaggtcttctgttagctagctcttcttctgtaacagtctctttctatgtattaatcaaaactgatgcaactttttaaagaactattcctagaaactttctcccttcccagtcagaattaatgtattatttatccatttaaaggactatataagtaggacatgctttgggtatataacagcacttacggccatttactttgtggttcagtgatttctgtgtgcttctgacttgtatatactttcagcccttgtagatgtagtggtggtagttttcccaacttaaatttatctttatcatccacctttatccacagtcctcctcatgattagcacattgtcaataaatatttactaagctgaactgaaagtttttattatgcatacctactaagatgtccatgtccatggtcatgcagaacagcagaagataatttttttttaccagtgtatctattgctaacaattgcttcaaggtcaggagccaactcatgtattagacatgtaaatcttgtgaaaatattcatattggaaacagcatgtagcaagtgcaaacagagctaaataaatcctttaatttatcacagtcccttcgaagtatgaattcttcttctagcattgcatcaaatttgataaaatccaaaaatattttatctcaatgttttaaaagtgttgatgctgtatacattgagttattgtacaattgaatggaacccacattcaaagtttttcctcaatgttaaaattaaatggttctctctgtgattccttctgtttgcagttcttctcatttcattgttagaatttgcctctacaaatgtaattcatttggcattgcagacgttctgatcttttcaaatgtgtattttgacaggtgcctcatacattcatccttggtttgtgctgtgggcctaaagtttatatctctccaaaattcatatattgaaatctaattcccaatatgttggtgttaagatgtgaggctaggctggacacagtggctcacacctgtaatcccagcactttgggaggccgaagtggacagatcacgaggtcaggagttcaagaccagcctggccaacatggtaaaaccccatctttactaaaaacacaaaaattagccaggtgtggtggcacacgcctgtaatcccagctactcgggaggctgaggcaggagaattgcttgaacctgggaaccagaggttgcagtgagctgagattgtgtcactgcactccagcctgggcaaccgagcaagactccatctcaataaataaataaataaataaataaataaataaataggggcggtctttgggatgtgagtaggttaagggggttggggagccgtcatgaatgggttagtccccttataaaagaacccatagggagctactttgtcccttttgcccttatgccatgtgaagatgcagcagtaagtttgagaaacaaacctcaccaggtaacaactctgctggcacctagatcttggacttcccaacccccagaactgagaataataaatttggtttataaattacccagtctaaggtaatttgttacagcagtccaaatggactcaaacaggttgtaaacacttgaaaaatgagtatctgtattgaatcgcatattttagccgtagtttgcttgtaggagtacagcctatgtccaaagaattaataactgactctcatttgaatggccaagatttgctctctatttccagtattttatttttgtgcctgtatgttggatacaggcaaatttttacacaataaaccagaaaagttcaatagtctttcattctctgctttcactaacttcttttaagtatatttcaacaattatcttaatattagcaccagtagattaagcgtactgttataaacactctttctatttattcaaagcttgaattgagctagctgctaataacatttttttaattagcattgcaaccatattcacctaccatatttttccctctcctttgatttctgggccattactcactttcacaatttgtatgtgactcaccattctatacctacttttgccttaccttaaaatattttttgatttaatatatttacattttttctccttttgcttttggaattgtattactatcacggggggttttcttttcctttttcaagagtttctcaaaattcttgaccaaagccctatcccctgaagtgagtaatattcttcactatattaccgcatcacatgtttacatcaggctaaagtaagaaacactactcgtgttctgtagctaattgataattgttaaaataaacttaacaattgataacaaattatagaaaatgattattttaaggttctttatacttgtaatctttgtaaataatatgagttatcacctctttctgtagctaattgtatagggagcacacccagttagtggcatatttcttaacacatttctgatatcaagaataacaaatacaatgcagtggggagtggagaaaagaaattaagtgtggctacatctgcaagtaacaattgcagccacattttgtcaagggttaaacaatcgtcaatgagctatacacattgtttgtcaccagaataactgaatcaagaggttccaactcattgtttcattcccatatacctgaacatctgggacatgaagaaatagtgtgtatgtgttaataggcaaagctgtagtaatgacttctacatattggaagcagttatctattttcctgttactatctaatttttacacaaaaatacctcagatgaatattgacagaaactcagaaagaagtatggcataaactaatacgaaggtaacgtagtaatggcagaaagttacagcttaaaagtttttacagtgggaagactattgtaatagtgagagccatgtataagtttgttttgaaatgataatgtacagctaaagagtataatgctcaaatttttgtatatgaagttttcgtaattcaacaagtagggttaagagacaataagaattacacagaatgttggattttatttcacgtctgttcctcttgtcagacattgccatctttcccatgtttcgtcaggtcttcagtaagttaacaacattcactctgtgaaaagtaccacatgatttattgtataaatataattggaaatacactgtggttcctcatatcctcaagcttataattcagtttggagactacactatataaatgtagaaatgccataattatgcttataaattgattttttaaaacatgcaaattaatttggtagaaactgaatacataagtatgggggtgccatataaaataatgatcaatgccagtgggattaatcaaagaaagtttcttggggaagtgaattctaaacagaatttggtatatttgtttatttagcactcattttatgttttctaattataaatataacgtattctcatattctgaaggtaataaatttgcaaattttaaattagtaggaagagtaaaaggaactaagatcccactgtccaaaggtaatcattattcaggttctgttcttttccttccatttggttctctgatattttcttcatggttgccattacatcacatattcaatattatgacccactttgtgtttcagtcagtgtctatacatacaactttgaatgatagaaatgtctcatagaaactaagtttaatcaaatcaagaaactaagtttaatgccagtctatatcaatgtaccgtttccttctagctaaatatttaggcttttccaaattttgttaacataaataactccaaagatatttttgttaacattttctcttagtgttactttcctaaggtagactttaacaatttactataacaaattataaaaaatgatcattttaaggttccttattcttgtactatttgtaaataatgttatcacttctttcgaattatttcttcttgatattttattgcattgatcagaattctcagaattgtaatataatgttaattattaaatattacattccttctcatgttaatagttattattttgtaaatatgatgctattagcaaattttagattggcatccttaatatattattcagatgttagcaattgcacttttccctaaaaaggctctttttgtggctttttgtccccgccatggctttttaccgccgcagtattttgcccccgccgccgtgggtttcagtccccgccgccgcggcttttggcccccgccgccactcttttgacaacgcggctttttgcccccgccgccgaggctttttgccgccgtggctttttaccccagccgccggtgttttttgcgactttttccccccgccgccgccctcgcggctttttttgcccccgctccagatggtttttgcccccaccagcgcggctttttgcccgcgccgccggggctttttgccaccgcggtattttgcccccgccgccgcggcttttgcggctttttgaccccgccgccgcggcttttgccgacacggctttttaccccccgctgccgcggctttttgcgccccgccgcggcgactttttgctccccgcctccgcggctttttgcgccccgccgccgcggtttttgcggctttttggtccccgccgccacggcttttgccaacacggctttttaccccccgctgccgcggctttttgcgccccgccgcggcgactttttgctccccgcctccgcggctttttgcgccccgccgccgcggtttttgccaacgcggctttttacccccatcaccgcggctttttactccccgccgccgcggctttttgcccccgccgccacggcttttgccgacgtggctttttgcgccccgccgccgcggcttttggccgtcgcgtctttttgcccccgccgccccggctttttgctcccgccgccgccggtttttgccgccggggccgtttgcccccgccatcgcggctttttgaccccatcgccgcggctttttgcagctttttcccccgccgccgcgggttttgccgacgcagctttttactcccactgccacgactttttgcgcccaccgccacgcctttttgccctggacgccaaggcttttgccgacgtgattttttacccccaccgccgcggctttttgccaccgccgccgcgggttttttcccccgccgccgcggctttttgtgtttttttgcccccgatgctttcggcccccgccgccgcagcggctttttgcccccgcccccgacgccgcggctttttgccgccgccgccaccggcacggctttttggccgcggcgactttttgcgcccaccgcggcggctttttgctccccgccgccgcggtttttgccaacgcggctttttacccccctcgccgcggcttttgccgacgcggctttttactccccgccgccgcggcttttgacgacgcggctttttactccccgccgccgcggcttttggccgccgcgtctttttgcccccgccaccgcgggtttttgccgccgaggctttttggctccgccgccgcggctttttgccctcgccgccgcggatttttacctccgcagccgctgctttttgcagctttttcccccaccgccgcgggttttgcggacgcggctttttgcgcccaccgccgcggctttttgctccgtgccgctcgtttttgtccccgccgccgcggctttttgaccccgccgccgcagctttttcccccagtcgcgggttttcgcccccaccgcagcgattttctgcccccgccgccgaggctttttgcccccgccgccactactttttgcggctttttgcccacgccgccgcggctttttcccccaccgcccgagctttttgccgccggagctatcagcccccgccgccgtggctttttcccccgatgccgcggcgttttgcccccgcctccgcggtttttttgtccccgccgctgagactttttgccgccatagctttttacccgcgccgccacggctttttgtggttttttttgcccccactcccgctgctttttgctcctgccaccgcggctttttgcccccgccgcggatttttacccccgccgcggaggatttttcccctggtgctgcggctctgagggcaggagcggcagactcggctgctagctccactggcgtcctggcaagggcagcgccgaggggcgctcctggtccagctctcctggctcgggggttctttgcctaggcgccggcgccccgggctccctgcctcggcctctgtggcctgcatagagcggcgctgcgcgcagaggcgatgggagagaagaaggagggtggtggcgggggtgatgcggcattagcggaaggtggcgcaggggccgcgggcagctccagaagctcattggcatcttcattggcagccttcgctggctgggcaccaagtgcgctgtgtcgaacgacctcacccagcagaagataccgaccctggaggtaaggggttcggggacccgggctgggctccaggaggagctcagacacctccctcggggccccagttcactcctggcccagttgcatccttgagcccgcattgcgcccttggagtcttcccctccctcctgcattcgctgatgcggcagcaggaggacccgggaccagccctcaccttgagcgcgatttgtggggcgggtgcgtggtgggaactgggatgaaggatccagggtcctgtgggggggggtggtgggctgtgcgcggacatccccttccaccctgaatttccatctggtccagccctctcatcttgtaggtgaggaaaccgaaggcctgaggaagaactgacttgccaggaacccctgttaaggagaattatcaaagtgtggttattaaaggagaactgagatgggagtcagacctggaggcccacactcttggttaagacattataccaccttgagtctggcctgtttactgagggtgagccactccatccttgtctgattgtggggtcttgacctcaaggggtttcctgcaggaagaagcaaatgggtttgctttcctagctctgtccagtatcttagggaccctgaggactgaagagattcttgtagagccatctggtgtatgtcatgggtgggccttttttgaatgtcagtctgcccagtgagctggctcagcctgaatgaactgtcttgaatctttggagttgtctgtgtacttttaagggtttctcatccttgcaccaaaagatcccctggaaattaggtgggaaaaccttaacttttgtggggccttttgtttgtcttaaaagttcatgcacatggccaggtgtggtggctcccacctgttatcctgtcctggatcccttgagtcaaggagtttgagaccaacctggacaatatagtgagaccctgtctctacaaaaaataaaatgttagccaggggtggttgtgcacatctctagtcccagctactactgtggctgaggtgggaggagcacttgatcctgcactgagctgtgagctcaccagtgtactccagcctgggccacagagcaagaccgtgactcaaaaaaaaaaaaaaaaaagacaggaaaaattcttgaagattttgcattctgtcccactatctattggttttcatgtcaagataatgtcagaaattctttacaattgcttccagaaggagtagccttttgatctagtgcacaggtgtccagtcttttggcttcttagggccacattggaagaagaatgctcctgggccacacataaaatacactaatgctaacaacagctgatgagcttaaaaaaaaaaaaaggtttttgcataattttcatgatacccaccaccacagataggcggaaaagtccttgtagtcaaagggttgacacggctgatctagtgtctgtctgttttggctttctccctgattccagaatgcaggtagagatgtagagacatgctctcaggacagctgttgagataaaaaaaaattcgttgtcatttattcccaagcacagctgtttctcattgcattgaaaaagtctccattcaaactgctgtcacataaaatctatttatgtaagtctgtatttttctgttgtcttggcctttgtaggcagtagtgtgttttaaccgagcaaactatccttccaaataatgaagccgaagtcagcctacctgcttgccatttttcttccccttccatttttgtaacctcagaataattgtaagaatgaattaagatttgtgtttaaggccaggcacagtgtatcaggcctgtaatcttagcactttgggaggcggagacggatgtatcgcttgagctcaggagttgaagaccagcctgggcaacatactgagactccgtcttgtataatttaattaaaatttaaaaaaagaagagaaaaagacctgtgtttaaaattttaaaaaaggggggaaagtgtaatgcaaaatgtggactatgccagctatgattgggaaaactagtttttcatacagcattatctgtagacttgtattagcagcacactggtcataagcgttttgctttcctcaaatatgatgaggtaagctaattcaaagtgtgttggggctttctgccgcgtggctcctggaggtgttgagtcccaatttagccaattaatttgggtttagttttgatatggataagggagaccagcttcattcatggtgtacacacagttttgccaataaggagaaaaaaaaagccacctgaatgttcctactcagagctcctaccccacccccaccaaggcccgggccattaaaaagactcaatgcagcctttctgtatctcatactgtattctgcaaggtactcctgtgaaagaaagttgtgctgcatcagccatctccctcctgaagatccctgcggatgaggatttgtgttttgaaggttctgagaattcctgcaacaacaattctcaaacttatttgtccaggggatcttttcttccactgaatgtagttggggagacatggccttaagccttgagcagagaaagagacaactgttggctcacttacaaccaagtgttgtgtttatgttttaggtttttacgaaactgaggtgctgtttgaggttctaaatgaaattgggtggttgaagagaggctggtgtccctgtagacttagccagccatgagaagttgccttttgttgaaggaggtgttttacaaagggaaatagggtgtctcctgggcatcgcattagcacttaaatacatgtatcactgaaatgaaatgaaatgatgaaatgatgacatgaaatggtgaaatgaaatgaaataatgaagtgaaatgatgaaatgaaatgatgaaatgatgaaatgaaaagatgaaatgatgaattgaggaaatgatatgaaatgatgaaatgaaaaggtgtaatgaaacgaaatgattaaattaaatgagattaaaagatgaaatgatgagatgaaatcatgagatgaaatgatgagatgaaatgatgaaatgatgaaatggaatgatgaaatgatggtgaaatgaaatgaaaagatgaaatgatgaattgaggaaatgatatgaaatgaaatgaaatgatgaaatgaaatgaaaaggtgtaatgaaacgaaatgattaaatgaaatgagattaaaagatgaaatgatgagatgaaatgaaatcatgagatgaaatgatgagatgaagtgaaatgatgaaatgtaatgaaatgatgaaatggaatgatgaaatgaaatgatgaaatggtgaaatgaaatgaaatgaaatgatgaaatgaaatgatgaagtgaaatgaaatgagaagatcaaatggtgaaatgaagaaatgatatgaaatgatgaaatgaagttaaatgattaaatgatgaaataatgaaatgatgaaatgatgaattgatgaaatgatcaaatgaaatgacgagatgaaaagatgaaatgaaatgatgaaatgagatgaaaagatgaaatgagatgagatgaaatcagatgaaatgatgagatgaagtgaaatgatgaaatgatgaaatgacgaaatgcaacaatgagaagaaatgctgaaatgaaataatgaaatgaaacgatgaaatgatgagatggaatgatgaaaggatgaaatgaaatgatgaaatgaggaaatgaaatgatgaaataaaatgatgaagtgaaatgatggaatgaaaagatgaaatgatgaaatgatatgaaatgatgagatgatgacatgacgtcaaatgatgaaaagatgaaataaatgaaatgatgaaatgatgagatgaaatcatgagatgaaatgatgaaatgagatgaagtgaaatgacgcaatgaaatgttgagatgaagtgatgaaatgaaatgatgaaatgaaacaatgaaatgaagtgaaatgagatgagatgaaatgatgaattgatgaaatgagatgaaaagatgaaatgatgagatgaaaagatgaaatgatgaaatgatgagatgaaataaaatgagatgatgaaatgagatgaagtgaaatgatgaaatgaaatgaaatgttgagatgaaatgatgaaatgaaatgaaagaatgagatgaaatgataaaatgagatgaaatgaaatgatgaaatgaaaggatgaaatgatgaaatgaaatgagatgaaatgaggaaatgaaatgatgaaataatgaaatgatgaaatagatgaaaaatacttattcattttttttcttggcatccttctaagagtattttagtgtggttaatttctaaaaataagttgctattcaatggctatacagttggcctttgctccacaggggtttgaactgtgcacgtccacttagcaaaaccaacaattctacatccttatccacaccctgcctatgaaaaggatgaggatgaagacctgtttgatcatctacttccatttaatgattagtaaatatattttccttatgatttgcttttttcttttctctggcatgtttgttaagaatacagtatataagacatataacatattaaatatgggttaattgactgtgttatttgtaaggcttagagtagtctattagtagttaagttttgggggagtcaaagttatagtggattttctactgtgcaggggggccagcaccccaacctccgtgttgcttaagggtcaactgtacatgttatttcctttcctgtaagagaaaaatgatgagaaggtcttttctccaataagtgtattcaaaatgtagcagatttgaaatgtgttggcgccaccattttgcgtctcactttgaaaacttattatttaaaatcgtactaaagcctatcttacttttccaacattagaaaaaatgttacaaagaaaaggggtgaaaccatgctagtttgccctgaaatttgaccttatcttttaaaaatatatttttacattaattacttccaaaatagagatcagttgcatacaaatggcaggtcaccgtaatccaccctatggctgcacttagattcatgaggaattgtgccaactagaaagggcagagaagaggaatagggtgctctgcgtcttgaaatataaacatgcacatagccacattctttgattctcttgtcactttgtacttacagctaggaagagggcatgtttgtgtatttttatgctaattattatccaaattgttaatgatttacgctttcagaaccatataaagatttttttcctttcagatataaactatcttgcattgttcttctgatcatatgaggaataaatatgcctaaatattcttcagaccataatattatgtccatataaatgccagtagcaagagtagaaacaaccacaactgcctttgtaattatttaaagcacgtgtgcctataagtaattggcattttatataatcaagaatctttgatataataatctctcaactatttgaaacatggctcacatgtattaattttttatgcaaacatatatataatatcagtgtatatgaaactaaattttcgagtttagaacagcttcttagaatcctgacttaaatgtctaaagtaatatttgacttaaaaaaatttagcacactgtcactatgatgaaaaaaattactataaaattatttaaaaaatttttccaccctaacatttagaatattctcacattcgtggttaaaacctaatgtgattgttcttagaatttagataaaaaaatgttccagaaagtttgaagagaagcactttagtcaatttttagttgttgaagcatgaagaaatggcatttcattgacattttaaaaattattcagattccctctttgaattcaagtgtttcaaagatatcttattttaaaataccaaaataggaatagaatatgaagggctggttatgagtaatatgatacatatttatgagaggatgagattacaataacaatacctcctctcatagaatagccagcaagtctccactaaataacagtgccttgattttataaatgcttaatcatggatattgagttaatgtgaaccatttgtagacacaggagtttattaaagaattatataatatctttcaagtatttagaatagtgttgaaattaagcctgcatccccacgattttcagcggtgctgatgcctaataaacaaccccttgcatgccaaaattggcttaaaggtcatctgttacccaagctacacttcaagcatcaaggttcaaaaatgtgattttaaatatgcaagagtttgaggaattcactactcacacgttcttgaacagtctatccaagtgcatcaagcacaatgtgagtaaagaaattttgaccaaaggattgatagtaatgttgaatacatttaatagtagatctaagattaaaaggtgaaagtgagggtgagaagagtgtatgaatgttttgtgttctgacaaagagaatgtagcacccaggtcctacctgcttggatgcattgccagtgcccacggtaggccattttatccaggtttttaggttttgttttgtttcgttttgtttttttcttttcaggagagttagtccaagaccaataactccataactggtagatttggaagactttaatactgcttaacattttgtacatagctttataacagttttctttttctttttttctgagagattcttttcaatataccccatcatggttgaactcaaaaatcattgcttatttaaaatctacaactgctgaagttttgtaacgttcgcattccaggtaattggttttttgtgcattttctgtatttttctccatcagtctacctagatatttgttagatttaatattttaatatttttctgaaaaagtgagcttttgcatttttaaatatatacccagttgctttaattctgtttttttcgtgtactatttcctcgtttttttgttttgttttgttttttttttgacacggagtcttgctatgtcgcccaagctggagtgcagtcgcgtgatctctactcactgcaatttccaccccccacgttcaagcaattctcccacctcagcctcccgagtagctgggattacagatgcatgccaccatgccaggctaatttttgtatatttagtagatagtgggtttcaccatgttagaccaggttggtctcgaactcctgacctcaggtgatccacctgtctcggcctcccaaagtgctgggattacaggagtgaaccatggctcctggttatctccttcattctttattttacttgttttctctctctctctctctcactgtttctctccttctcacattcactttgcagttgtcaaatagcccaggtgatgttacagattgactccttataaaaggaggcattacacattacacatgcatcttagtggccttaaaaaagtgtttggtttatttgtatggactattcacctttaaaatatttcaatattcattaaaatagcttccaaccaatattattagacttatgtttctagctttcgtttttgtattgatatctgccttcattgctgtttgtttaggaagtatattctgtgtcacgttatttccgtgaaaattgtttgaatttgtggtatggtctagaaaatgttaatttttgtaagtattctgtatgaacaagaaaataacatgaattataatattcatgttccttatataatatttgccctttttaaaatccactagcttcttttaaaacttactcttttaattttttcttttatctattattgaaagatgtgtgtttgaaatgtctataatatttgggggcttatccatttctactttctgatatttttgctttatataatttgactctctctctaaatacgtgtgtgtctgtgtgtgtgagagagtgtgtggtttgtgtgtatatatatatgtatgtatcaggctaatgcacatttaagtcatcacatcttaataacttaaaacttttatcacactggttagactaacttattttaataaatatttctaacttacattctgttttgtctacatagcaactttttaaaaaattatattcatgtagtatgtttgtatgtatatcatatatacacagtatctgtattgttcaaacttcaaagttcctgtaaatttatatattagttgcctctcttgtaactatgatagagacagatgttttaaattttgccaatctttgtattttaacaaaaacattgtctacttaggtttaagttaatctttgatcatttatacttaattttgtattattaatttgttgtgtggatatatatatatatatatactgtctcattttctcctatcagtttctgtcttcttgttttaaaattgtgacttttatttttattgttttcctagatacaacagagaaatgcataatgtccaatcaatttattaaatttccaaagtcggtcacgcgcagtggctcacacctgtaatctgaacacttcaggaggccgagacgtgtggatcacgaggtcaggagttggagactagcctgaccaacatggtgaaaccccgtctatactaaaaatacaaaaattagccaggcatggtggcacgtggctgtaatccccgctactcaggaggctgaggcaggagaattgcttgaacctgggaggcagaggttgcagtgagccgagatggcgccaccgcactccagcctgggagaaacagtgagactccttctcaaaaaaaaaaaaaaaaagttgcaaagtcatacctttctgctcttgtcagacaattaaggggtctttgaatacttcagccctaataatttgcttcctaacatacatattgcagtgcttatctaattttaaatatctttttgttccaacacctaattttttatttagatctatctgtatgtttacaatatatttttctctgtgttcattctttgatttcagaacttcaatctttctgaagcatgttttcagagtttctttttagtttctttagtggaattctgctggtggtgttttgttttttgtctctaaatatgttatttagccataggttgatgaatatttttcttggttgagaatttcagaatggcattattattcttaacaaataatattgtttattttacctttcatgctttcagatttcaatatgattaaaggtaatttgatttttctagtgctaattgaaatatttttccctggccgggcgcggtggctcacgcctgtaatcccagcactttgggaggccgaggcgggtggatcacgaggtcaggagatcgagaccatcctggctaacaaggtgaaaccccgtctctactaaaaatacaaaaaattagccgggcgcggtggcaggcgcctgtagtcccagctactcgggaggctgaggcaggagaatggcgtgaacccgggaagcggagcttgcagtgagccgagattgcgccactgcagtccgcagtccggcctgggcgacagagcgagactccgtctcaaaaaaaaaaaaaaaaaaaaaaaaaaaaaaaaatttttcccttcctgattgtttactatttctctaggagatatgtagaggtaggtttatctccattgtagcttgcttagcatgcatagaatttttgaatatgcggattagtgtcttacaagagtctagagaactttcagccaaaataccatcacatattgtcccttcccagttcccttcttctaagagaaccctcactaaacacatgctacactttctcactgtatcttccatgtctcttcatgattctgtccacattgtgcatttttaaaaattttctgtaatgcattctgaaatatttatgaactctcaccatggccatgtctaatctgatgagttcatttttgagtttttaatttaaaatactatatacaaactacttttccaatttgctacatcaattttttagtctcctaaaaatatattcattttttttaaattttttgaaattaaatgagctttataatctaacagtgatatttctactaatgaacctttgtggatcggtttgtactctttttctgctttcctttcaaatggtagaatatcatttccttgcatacttagatgcctttgaatgacaaagatttatttttctctgaaaattattattgtgcacttttgcatattagtaagaagaaaatttgccaaagagaatttgaatttgttgtgagtcttctaaaggcatcaccattctgggaccacattatattaattcttggcctaaaggtgtttggacatatgtttggactgcacatttaaacagtttttaaattaattgctgtaaatcattaatgattgagttgctttaaatctgtccaatctcaagtcatttttatttgccatttccagggaatgtgaaatgggactaatttacctctgattcttctttatactgaggatataaattttggtcctagctttagggaagagctcctgtgtgatgccctatcttgggaaaaactatgtatttatttactgtcctatgtgatgtatgacagtaggaatctgcactcattcattttgctacatgtctgtagggcaaaatcagtttcagtgtttaggtgtattttgtctgctccctgcattcccatggttttgaccttatattttactttttttgtgaacataccagtgcttcaaattttttgcagtaatattttcaactatattatgagaaagagaaaaattttgataaaacacaaatttcatgttttccttctctaattggcttttacttaaaaatacaggtaaaatttatttgtgcttttttgctatttctgttttgctattctctgtttgtctatgtcttctccacatagacacaattagggaattttgtacactcttgtgccaactgctttgatagtaacaaaatgtatttctcgaactcctaggtataaaactcaagtatccacaatttaaattcttttttgctcacttctgttacatttccagtctcaatagaaatcgatgccaatccagaaatacaagcattattctaatacttctcacacattactgatatagattaaattttctagatctccttaaatactatcatttttcactacttgtatcttaactgttaagttcaacattttctataatattaatatgttgtgaaaatttccttactttcttacttttcccaggttcaatgttttacagtctctacctcaccctgtgaagcataaacattgtacatgctgtacaaataatacatagttcatgtacttagagattgcacgatttttatttggttgacaatagctaatgttttcttcttcattttctatttcctgatttttctttatttagtatatactacattatcataaaaataagaacgttttacaaactaaagcaaaagcaaccctaggaataaaatgcacaaataaaatatataaacatacatttagatgtaccacgtacccttgtaatttatttagacaattaattctagtacaattttaattagtctgtgtattatctgtcatcgtcttagtattttttatataacaaattttgtaaatcaaaaagtctcaatgtcattataaactatcttggcagaggttgatctccaaggaataatttctctcccaaattatgccaatcagaatttcactctaccataattcttttaatgagtttcagaggaataataaatttcaaaattgttcaaggtacttcttttagttcaagtaccttttgacaggtgtaaaactgtagacagactgatacaaacatattctaattgactcaaaattatatgggacctattttaaaatctagattttaaaatgtcttgtcaacatacacatggtttccttgtgaaataattgctttttattctctggatagaataatttaatctttaaacattcaattctctgttagaaacaaaatattacataaggatatgcttataaaaataattcccaactagattttcagttcagaaatatatgtgaaaaaatcatcaattatctaatggatttcaaggagaaatgggttagtaatttattccatatgtctcaatttttcctagactcaaggcttcctttaaaataattgtaggcgtttaagaaaccatgtaaactaaaaagaagaaattgtgacactgccgcttaggttttttaaatctttggacatgattcaatatattttttaaattgtaccttaattggacattgtgagttcaccatcttcctgtcagtattgcatccaagctgattatcatagattagaagttcaactatcaactgtgttctgagagtctaaaaaaataaatgaacgtatttgtttgggtattcttaaagcaggagtgaggacacagtgaaagtgagacaaggaaaagagaacaaaataaaacaggaaagagagacaagccaataccacacgtgttaagaggtaagttcctgtgttagatatctgggcttaattttatgggaagctatgtggagcatgcctcagaattacatcactgaatccagggagattcttcttagataccctcaccttttcttcccacttcatgtccagtcacaagctcccgtgctgctagagaaagtcctcagctagaaacaggtgcaaattctggagatgagaccttgtagagtgttaagaatggttttcttcccagcagctacaggtaaggaataggggctgggctattaatacatctgctacaaaccaatgaagcccttatgctccttttggtgatcgagaatgtgtttaaaaatattagatgatcaagaagggctgcagaaaggaggaaacagaaacaaacagcacacctcttggtttatttttattcatttcatcagtttcaaggaaaatatgttgggagttcctggcatagagaatgtcacaaagacatgttttcaatagtagtgctatccctagggcaaagaagacccagagaaagcccaaatggctgatggaacaaagtcagacaccgtgccacctgtccacactccttggctctgccatcatgctgaagatcgttttaaaggactggcttccctccccccaaaattaaaagagcacagactgagaaactgaatgtaggagacagcagtggattatgctgttctcaggggtcacctcaggtttggaagcattctttcaaattaacccatctcaggccatctgcagagaagaaaggtggtacctaactttttttcttgtcagcatttggtaggggtgttttattgaccaaatatgttcccacaacctggttttttgtgactaagtaaatatagtagatttttaaattttatcatcaaaatctatagacaatttttgattaaaatagactccatatctatgtcctgcttttcttcttattattaattacattgctgtataaaagaacaagacttcagaatcaagaatatcttgtctcttcgcattgaatttatatacaaggtgctctttctttaatgctgtctcaaaggacatatttttactcattaaaaaggaagatcggaatctggttgtatgcactgctccaacatattaataattaaaattaagaggtaaatgtggtcaaagccatagaaagactgagatgtcatttatattgattactctatagcactctacaaacagaaattgtgaaataagtttatataaatattttgtagcatttcaaatatttgagtgcttgaagtttctcctcttatatagttcagattatcaatttgaaaacttactccgctagttaatatgtttttagtctcgtttgagtattatataaaagcaattttcagttaaatgtgttccgcttacataaaacattacaaattattgaggatttaattacttattcatgttcctgtaatgtctttagaagattttcttcttattacctatcaatatatgtatgctttgtcaaagaaaaatcaaacatatatatcattgaaattgaaactttttaaaagtacttattaattctattgaaaaaccacatccataggaacaattacaatataatattgtgaacatgtaaacatataccctatgtctattttatgtataatcatatatgattaaaaatatagttaagaatttttaaacctagtattatcaagtaaaaattagttaacttctgatgattgttaattaagataaaattattttgatttgggtgattttaaataaagaaaaaaattacatgacaaaaattctttataaaatgtttatgatttttacattggttttatcactttattccactattttattttaagatgaccagccttgtttaaaacactgtattcatcttaattaaattaaattccatttgtaaaaaaattaacaaatgatttgctctattatacagtgcggttgtaaactgagtcagtatctcaaggtttgacccccattatcgtcatccgtggccctatttgtttgataaatgtattgtctttttccatgcctgtcgcatctctattgctctttcatttttctctttgtcccttatagggagcattgcctatctctagattaagcaaaagttgcatcttaaaaaagcacaataacctgctcaatctttctcacacagagaaatgtttgttaagtaattaaagtgtagatgatgatacaaagagcttgattaaattagatgccaaagtacccttgtgattcagaatatgaatggtatttaatttctttgaaatcattaattgctgagtgacattaattaatgccaatattccagaagttgttctagttagtgaaatgtatgcaacatgcaaaagattcagaactctgaagggcaacattattctataattaagaattaagaattaattcacattaattattggggagaaataattattaagaattaatgattgagaaaatgtttttattttttatttagaaaattattttgtacatgagcattaccgcaagttttgcaagaaatataaatttaaagaaacaattatgtgcacaaggtgaatttaataacatcttgatattttccacgattacagttttatttggtaaatctataaaagcacatcttctaaagataataaatgaatcttggaaatcttgtaggtaaaggtaaatattaggatgcatccaattacatttacacacacagttacatttacacacacatacatgcatacagactgatacacgtgtgtgtatatatatatatatatatgaatttactaattgattttaactaatatttataagagccagttggattgatatatattgttgaacctgaaaaatatttattatatacatgtttaaaatacacacagaaataaatagtaattgcaccagacatttgaaactgtactaaaatataagctgtgaacattttgtgatcattacaaattcttacactgaatatttttatttttacaatattaatatgtttgatatctgtgtacattttttacaatgtgttattttatttttgtcatagagtcttgtcatgcataataacatttcagtcaaagatggattacaaatacaaaagtggtccatgagattataatacatatttttacatacttttctacgtttaagtatgtttagatacataacctcttaccactgtgttcttattgcctgcagtattcagtacagtaaggtagtacacaggtttgtagcctgggagagagaggctataccatataacctagacgtggtaggctgtacaatctaggtgtttgtaatattccctgtgatgtttgcaaaatgatgaaattgcctatggatgcatctgttagaacgtatccctatcattcagtgatgtgtggctgtactaaaatgctcaatgtaagtttcaatgccctccataaaactgttgtactgtgaaatacaaatctctcacccatggcctgaatatgtttgcaaactaagcagatcaggggaaggagaatgtgctggcatcgctgggatgattttctcacactacatgaataatatctacagacttagcgcatatgagccacttgcatagagttaaagtaggcatctctttgctgggaaatttatcaaatgggagtatgtagtgtttttaaaagatacttgtttgtttgtagctggtaggcatacagtggctcatggcaatggttaaggttgctaagatttggtggaagaaggcaaaatgaaatggccacttatatggtatatggtatatggatcacttgtttctgttgagttacagactcagctggctatttctcccaatgttagttatttggagaaaaaaacgtgatggtaattttggagtaacaaatacaatatttgatgaaagcaaatttattgagggttagacaaactacaagatactttaagctgcaaagtcaacacgagacttctggcccaaattgtgcagagtttgcgtccagctgcaaagttcaaaggaagaggccatataagacgattctcacttctgacaccaactgccagttcaggggtttcccctgaacacactcagtttcaagaatttactagaaagactcacagaactcattgaatgccattgtacttacggtttataatagagaaagggtagaaattaggaccaattggagagacatatcatataaggtggaatctaggagattttgaatattaagtttccattgtcttcaggacatactacctgtaattgttgtacagcaataaacatggagtactaccaagctggggagctcacctgatgctaaaaagacactatttagagaatgaaaagacaaatgaaaggatgggataagatgaccttccacattaaggcactggaaagaataaaaaactaaacctaaagcaagcagaaggaagaaaataaaaattagagaaattaataatttataataatatttgttagtgttgaataattgatattaattcttgactagcttttttaaaaagaaatattcacttcccaatttactctttggggccagtgttaccttgatacaaaaattagtccaaatagcatagaaaaataaaactactataagtataaatgcaaaattccttaaaaaatactaacaaatcagaactagcaacatataaaagaattatacactatgacaaagtgaaatttatacaagtattcccaggttggtttaacagcccaaaatccattaaggtaatacatcttatccatagaataagaaacgagaattgcatgatcatctcgatagattcggaaaagacatttaacaaaatccaaatgctttaatgattaaaaataaaaataaaaactcaatgaaccaggaatagagaactttctacaccagatacatgacacctgtgaaaagccaacagcaagcatgcaacttaatggtaaaggatgctttcccgctatggtcagagataagaataggatatataatttgacctcttctagtcaatactgtactaaagattttatgcagggcaaatcggcaactaaaaaaataagagtcatccatattgaacaggaagaaataaaactgaaaataacattcttgtatatagaaaatgttaaggaatccactgaacgatagaacttgtaaattatttcagcaatattacagcatacaagataaatgtacaaaaatcaattgcacacatctacaatgaaaaccccaaaatgaaattaagaaaacacttcaatttaaaatagcatcataaaaagaaataataattaatttggaaaatgtgatacaagattttactctgaaaattaaaaattattgtttaaagaatatctaagtaattagcaaacatcttacagccatgaattggaagatttaatactgtagtactttacaatttgaactacagatttgatgaaatccctgcaagtattccaacagacttctgtctagaaactgacaagctgattctaaaatacacatggaattgtaagggactcaaagtagccaaaataatcttgaaaaaagaaaacatattaggataattcacacccccatgctccaaaccttactgcaaagtatcagtaatcaagacaacaaaatactgatgaaggaaaaatatatagattgatggaagagaattgagagtccatatataaaactatgtgtctatggtcaatggattcttacagtggtgccatgtgcaattcaatgaggaagagacagtctttgaacaaactggttcaacaacgtacacgtggatcaccacttgcaaaataataaattggaacccttaccccaaagcatacaaaaatattaactcaaatgaattaaagacacacatgcaagagctagaataaaacatatgggaaaatcttcagcattttggatctagcaaagaaatagctgtaacatcaaaaacatgagcaacaaaataaaaattagatatttaaaatttcttaaaaattaaagacattggtgtttcaaaggacaaccaagcaagtcaaaaggcagctcaaaaattgtgagaagatatttgaaaaacacgtgtctatatgtctgtatatatatgtatcttgaatatagaaaaattgttttaactcagtaacaaatatcccaactcaaaactgataaatgataggaatagatgtgtttcccaagaagatacacgaacggccaataatcccataaaaagatactcaatagcatcactcatcaggcaactacaaatcaaaaccacagttagatactctatggctagaactggccactttgtaaaataatttgatggcttctaaatatattaaacatagaattgtcatatgacccagaaatttattcctaggtatacacccagattattggaaagaggtgttcaaacacaaattgtacataagtatttttagcagcaatatttaaaatagccaaaggctgaacacaactcaaatgtcaataaaaatattattggataaacaaaatgttatatccatgaaattgaatgttatacggttataaaaagaaataaagtaccaatacgtacatgaaccttgatagcattatgccaactgaaagaagccaggcagaaaaggccacctattgtatgattctatttagatgaaaacagaataggaaagtctatagagacagaaaacagatttgtggttgcttaggattgagtaggggatgagtgtataggatgttaacagctagagaaggtggggtttctttttgaagtgatgaaaatgctctaaaattcattgtgatgatggctccacttatctgtgcatatactaaaagccactgacttgtagacattaatgtgtgcactctacactatgtaaattttatctcaataaatcctttcaaaaatacacagaagagtaaggggttttggaaagttgcagctgggaggcagtttgaaatactgaataggcctcatcgagaatgtgaagtttcagtaaagacttgaggaagttgaatgagctgatcaatggatatatggagggctatctttccaagccaagaaattaactagagtcttggtcataaggcagcagagtgttggcatgtccagaggacagtgaggtggccaggaccactggtaagatcaagggtgaagatataaaagaattttggcggttaacatgcggcagatcatgatggggttgcagaccattgtaagaattgttgtttttagtgtacatgaaatggggagacaaatcattatcccattatcaatattttaataaattggatccatgaaccaaatgcaatgagattaaatcaattagtaataatatgcaaatttgtattaaaattacaagaattatttgcacatttgagaacaggagagtcatgattgtttatcagcaataataaacattattaattttaattgtgatcagctaattgagattaattgcaatacatcatgctttataatgtgactgtcaaaaggaaagtatgattgtaatcttatactacatctatcaatgcctttgattcataagactatagagtaagcccctagttttcaaagccaacttatgaggcagtgacatcttatgcaaatttgctgctttctgccacagtgatccttggtcagctggcacaaattgttttacaaacgcccctaggtctaaaaatagtttggatcacaatgaacacagaaacaccgtcatcccttcagaaatacctatcaattacttccaatacagaatgaaaaattgacaaaggaaatatgtggattgtaaaaatgccagttagcttgcatctacatcaaagaaaaatgccatttttattacattagatcattgttttacatgagttttggtatagcacaatgttgaaccaagggcaaagagagatgaattaatgatatcttgattaagatatcaagaatttgaaagaaaaggcaggtcatctttgaaggttagtgacatagcattcatcttctgttgtcaccttttccatcatgccctgtatgcctgatggacaggtttcactcaagttcagagaacagcatgcaaaattagctaccaattaatctttatgaagtgagctgcatttcctgccagactgagcttacgttttagcaggaagcatttttgggaaatgtttatgttagagtttgcccttcttgacaaggtgagacataaatgtctactttatagacatgaattaagatgggaagatatttgggggaatcatttactcaaacgctaaataataaaggtacacaaagggcaaattatactagatttctttcccacttgttttgtatgtctcatgcagttcaccttgattcccttcagtttctgtttaatgtagaaagtggcattttcattattttaagcttctagcacaatgaaagaatttctctttttcatgaacaggatcataaatgaaagggaggaagagtgtcctatatcatatttattgttcaacaaaacgctactccatggcttaaattcagtttaaaaaagagaatttattggacatctaacacatacataaaagatagtaaagacaaatgagaagagcgcaggatattgaagtatacagatttcaatgctgagttttatatcttaggaagctactccaccttacagaggctcaatttcccgtgatttaggaaggcgatgctaatgggtattgcataggtgtaagtataaaaatcttgtatttaagagaatcccacaagcttggtataaggcagaaaataaatagatgtgacatgaataagtagtttattacatttgtattctacctgcggactagaggaagcaagaaacacagccactatgcttgattagcattacagagatggtacaatgatggttgccagaagctggggggaggaagaaatggggaagtattttttaatgggtatagagtttcagttttacaagatgaaacgaattatggagatggatggtagggacggctgcacaatgttatgactctatttagtaccactgaactgtacacttaaaatggttaacagagtacattttatgttatgtgtattttaccacaataaaaaaataaaataccttaggaacattttcatgaaaaagcccacataaaattcattttaatgcacgtgtttatgcgtagctttgtatttttctcttttctctttatcttccaaattctaatcagagaagggaatcacctctgtacctccaggatattcagtaaagaccactggagtttcatgccctagtgacagtgctcatatagctccaaattacagatggctctagactaactccacaaagtttaaagagaagatttaaaacaacaacagacaaatactcatcctgaagttactgaactgcctgccacaacattgttcaaaggtagccaataaaatctagatagtcaatagcataacatcaaaaaaaccccccccaaaaaaactctgacatgcaaagaagccgtaagatatatatacttaagacatatattaacaggataaaaataagtcatttataaatgacagaaaagaaggaaatttcaaggcccttaaagtaaacatattttataaatacatataggtaaatacatatatatgtcaaggcacttaaatgaaaattgaacatagaaaaatagaagttataaaatgaaaaatgtgacatgtatagatgaaaaataaatattagaaataaaaattccatgagatagaataagtaatggattttacccaaacatcagaaaatttatagaaaaaaatagaagatttacaaactaaaggacaaagggtaaactaaaataagaaagccagaaactcactgatacatcagacaatatgcagcagtgtaacatacatgtaattaatatctcaaaaaggatgggtgggggaattataggtgaataaagaatggtacactcattcctgagggcaccgaggagggaagatagctttagatttctaagggagggtattatccattcatgaaggtccaaccccatgaccaaacaccttccagtaagccccacctgcaacattggggatcaaattttaacatgagattggaaggggcaagcattcaaaccatagcaagaattaaatttcctttttaaaaaaatcactgatatgattccattttgccatagataaaagcttgtatttcagcctaccattgagtgtgcttatagctcaccaaaagggcactctgtctcgggaatacagatttgcctagaggtatcctattgcagtcaaagaaagagcaatgagggatagaaaaggttagtgatggagacaccagcgctgcattttgcaacaaacaatgtaaaaattttacggattggttctgctaacttactacagtttgcattcctctcaggtgggagaattgttgcgtttttttcttaagatagaaaagcaattcagataatctgaaatctccacaagaaggaaaagaagcacagcagaaactattctaggcaggaagtcaatcctttcaacagtctgtgctccatagaaacaattgtctgcactggaagtcatatgagatacagacaacagccagaactctgatcctctcattagtgatttcagaagaaattaccagtcaactgagtaattcactgagtaaacatttggcactgaaagaggttagacggataaccatttgtatcaccatattcatgaagctggaatattttccattactggtatcacatccgaatggaagatgttaaaaagtctctcgtcttgtaagatggatatgaaagaacattttctgggaaatgaaattattaacacacctgcgaggtggatggaagagaaaaaaaagaataatcagctggagttcttctccttgataagacaactcactaaaaacataaagagaaaaatacaagtttaaaataattaaccagaagaagacgactcaagagtttttaaattgctgataagattttaatttgctccaagttgaaaataattatattgcttgtgttttaaggcccataatgagcaattgtatcacacatgatagtttcagcagtacaatattatccgttaactgctggaaatcataaaagcatagcacaatgtgaagatggaatttgctaaaataaaccatctgctgaaaactactattctgcaaatttaaaaataaagtttaaatgttattggtcttatttaataggtctgtaaaaaaatgcgctatttgaaaagtagctgctaccttaattaattcttcatattagacggctggttacagtaatgcacagtaaggtgctacttagatatattgctaaattttctgcatatactatgtatttggcttaaattatttgaaattttatagttaaaataacaaatgtatatttcaatgttttgacacaatttgcaaatatacctttaaagagcgtcttacactctaaatattatttgtcacctacatatttgtcttttctctataggaaagtttaaatttttcccttgaagctttaattatttgagtctataaaacaaactgataatgtacaaattaacagaaaaaaggtttacagatatgtgtgcaagtatgcacttgcagtttacataatatataaaaatataactatacaaatatttgtatattataaatagatatacaaatatatgctatatatataaaaactccaggaaaggcaaggtagtcaacacgcctatgctgtcttgacgttacacaaaacacagagctgtaggttggtaaatcaggctttgcggaagacaggtgaagacaaggaagaaagaggagcctgacagcagaggtggtcttgttacatggatgaaacctcacagggagcagccctcctcttgggaagtatagataggaattggtttttagaaatgtaaacatgccaggctcagttaatctttcctaaacccagacaagggagtatctcagggaaagcctgtctacatcaatgcagattttctctacaaatgcaaatctccccaacaaacacagcttttcagctattcttgtagaaggagctatctccagtcttccgagtagccatattgaaatatgtcaaaaagctgcccaggtgcatgcctgtaatcccagcactctgggaggctgaagtgggtagatcacctgaagtcaggagttggagaccagcctgaccaacatggtgaaaccccgtctctactaaatacaaaaaattagccgagtgtggtggtgcatgcctgtaatctcagctacttgggaggctgagctaggagaattacttgaccctggcaggctgaggttgcagtgagccaagattgtgccattgcactctagcctgggcaacaaaagcaaaactccatctcaaaaaaaatgtattttagggtaatattttgagtatctttacctccatatgtacaataaatattattgtgatttttaatcttttctgtggagaaaacacaggtgtgatttctagtgtagctgaacatcgtttatttgacaatattgcacttgtgtgtgggtgtgtgcgtgtgtagctactctttaattttgttcttacataattattagatattaacaattaattcagtaaaatatatgttttgcaatatttctccatgttattatgctttaaattagtttaatcatgcccttataatgtgtacattttaacctttgactataggtctcaatcttactttggtttttgtatttgaatttatgctaataaagtcctacagctaaaatagattatataaacttatctacatttttactagtattctggtgtcattttaaattatgtaatgaaatcaaattttaatttggattattgttatctgagttaaggatctaaattttcaatttcttacaaatactacataattatttctgaaacatatattgactaatctcccctttatatgatgtgcattataagagcttgggattgtttcatttgcaaagatgaatgcttgagaagtagatatttaatcataacattttaaaatctactggataacctagaattgaaaaatagcctataggttgaaaaactcctgtagtgaagaaagaaaataactaatatacagtgacaatataaatattataagtatttattttattatcgccctgaaatttgataatacaaacatgtaatatctacatatcatccatatatcaggtaagaaaaaatcaatgcactcttcaaaaatttagcataacagaaaatgcactctctctccttgatggaattaagttacaaataaaagtaaaaataagtagataagtagatggaagtagatgtttaaaaacaaagaaaaatatttgttttggataacataaaatctcaattgacaattccaatatttccagaactttggctgtcaactggtggagagttttccccaggagacatttgtcaatgtctagggttattgtggggatgtcaagactggtggaggtgtgaaatttagaggtcaaacgaaacacctagcattgctagggcagcctcccacaacaaataatcctctggtcctaaaggtaagtagcaccaaggttgagaaaccataatctagagagtaaacactatgtagctattccaagtgctcaggaaaacacatcagtgctctcgagaggaaaagtgtaaacattttaattgctgtacatggtgacacaaatccatgttgttaatctaagtggaaggggctgaagcacaaaacgtaattcaaagagtttacttgagccacaatgaggaccgctgcctggaagaaacagacccaagtatccttggatatgaactccctttggagctttgcaacaagcagtttcttaaaggcaaaaaagggtccagaagtgggatgatgcaaagaggtttgtcacaaattctcattggcttatggaaataacatctattagtgattggctatacactgttacactattattgggtgtggattatagtgtctggtgtggctttattggttaatttatagctactgtggtaacagcggcagcctagatgaacacacagctcaaagaggagcaggacagaactgctgtctcatttgaatatctctctgggcctgattatttcaaaggacttgcatttctcatatgaaagttattttcttttctcaaggtccataaatgagaataaatagacgtaaaatagatcttttcgaggatgaagtaaatagaatgaaaaacaaaacccaagctgaccagaaatcatagagggaagaaaaggttataaatatatggatttttcaaagtgattttaagctattaggaatcagttaaatgttgggggattttgtctgagaatgggctaaaggagaatgtcccttttgccttctgaagtttccctgaaaatcactaataggaggcagataaatagtagaaaaggcatacaggtttctgcaatgtgtgtacactggagcccttagaacgaagacccagacacacgatgcatgcagaagcttatctaccacatgaagtttacagaaagaatggggtcttggatcacagggaaaaaaaaaaaaaaggttatgtgagaaaacgaccctggctagcaacagtggacttattacataggtggaacctcactgggagcagtcctcagagagaatagacagaaaatgtttctttcagacctttggagacctcagactctaagttaacccttcctagatccagacaagggggcaaaactcagagaaagcctggctgcatcaaggcagattctctaacggtgcaaatctccccaagacagctttgcagctaagtctgcatttccagcccttctcaatagccattttgaaatatatcaaggaaatatatttaggggtaaaatatattagtttccttcatacagctataaaacatacaggaataatttttgtcaatgtctactacaaatccaatatagcagtaaatataaaacccaccagatattgaagaaaaaatatgtagagtacctcaattgcaaatgttgatactaaaatgccaaataaaataaaaataatttccaacaatatttgaaacagtaacacaagaaattggcaaaaaaaaataaaacaaatatccaccttggggatgaaagtgtgtttccaaatttggtaatccaataatattaataatcatattgattagcccaaattaaaaataaatagtggattctcagtacatgctaaaatatatttgttaaaaagcaatattcatgtctttagagattttaaatgctataaagagtctgatattctataggcaaacatgtgtatgtccattagaagaagagaggtctgattttcatatattactacatagagatagagaagtggatagattaatttgcatatgcatagagaaagcctaaaatagaaattcactatcatattaaaggaattttaattcaacaataaaataattcaaaggtaaaattttaaatatttttaacaggtacattattaatattagataatatttataattgtgaaaatattcaatgctaaaataagatgcaatgtctaaacatcagtattaaaactagtataaatatttgcttgtttatacaaggaaaattcaagctcgacctaaaattatataggaaataaaataaaaattttaggggagctctttaataacataaacatatatatacacacacacacatataacatgtatatatgttatatgggatagatatagatttaacatgttatatctatatttgtatctataactacagctgtatgtatctacatttctatatatttactcagtgacataaatatagactggaataaatataaagacacatatgattcttggataaaaaggatttagtatcataaagacaaattctttccaaattcacttatgaattcacaacaatatacagtttcattagtataatttaaaattttagataaattccaagattcatttaaaggaatatacatgtatacaagcagtcaagaaagaagcaagagtgcactaaactaacttgctattaaaatacatttttaaacttagtaactgaaactgagcagtactgatttccaatactggaatttaggtatatgggatctcaaaagcacagagctcaaaggagacccctgtatgcatgagagcttaggatgtgctttagaaaatattaccaaaccacgggcaaagttactttagtgtcttagtcttactaggtttgaaaagccagagaaaagactcaagaccaccatataagagcaaaacaaaaggacagggagagaatgtgaagatactgaaacattttacgtaaagttgtataaaacatcctttaaagaaaatgtgaagtttaggatatacatcaaaatcagcagagccactaaataaataaataggcattgtaaaacagcaagagaaaatttaaatggatttctaaaaaattatgacacctatgatttttaaaatatgtttaagaaatcccgtatttcacagggcagcctttcacaacacagatatgttaggacataaaggtccttctgtttttaatgtactagaggttatagggttacaaatgtcttctacccttgtcttttgtctgatggtgcaaaaaaatttcataagcatgtatttctgaatgcctgatggattgacatatataatatgctgctagtattaaaatatgtgtcggaaaacacatccaatcttctcactgtttacataaattctaggtttctcctatttacctcaaacacgtatggagcgaattcttaccttttaatattgccatggcattcacattgaacataaattgaactctctcttatggtagctgggttcagattcccttgacaatttccagttctaaccctcacagttcctcagtgtggctggcccaggtattgaccctacacagttgcctcctcctggtgactaccagctatggaaccgttggatacaacctacctgactcaccccacagacctcacagcgcacatggacagcctccacatgccagagtgacctgcagcgggagtcaagaaatgtgcctgctggcactcaccccacagactagtgccccgtggaaaacttatttgggtaatgttctcggcccaataaaggctggagtcccacagaccccttttctctctcctgctccccactcatcttccccattttgttcagccgtatgaggtgtgctactgtattagtccattttcacaccaccggtaaagatatgcccaagactgggtaatttccataagaaagaggtttaatagacgcacagttccacatggctgggtaggcctcacaatcatggtgcaaggtgaaaggcacgtctcacatgacagcagacaagacaagagagcttgtgcagggaaactcccctttataaaaccatcagatcttgtgagacttattcactatcagaagaacagcatgggaaagacctgcccccatgattcaattacctcccacctgttccctcccacaacatgtgggaattcaagatgagatttggctggggacacagctaaaccctcttctcagctacccttttctctctcgatctgtgagtaataaacctacttctgtgatttcccatgttttgttctgtggcctccatgggtctgagctgagctacactggaacctaactctccacctggccagggtctctgagagtggctcttgtcagaaatacacaggacacaggtcaggcaacagtcaccaggcatctcctagtctcaacagatgttctgtgagagggaggcctggtcgtgggatgcacacctggccactgctggggtaaggaagtgtcctgtgaaaggcacatgttaagcatccacaatgccctgaccagaaccccagaaaggcagggctccaattgacagtcactctccagagacaaatctcaagccctaactggaggaaaagaaaacaatgtaaaaagttgaatttatcttactatttcaatgatccagtaaagacattttatgcctgtacaccacatattttcttcgattgtggatttattttagatagaattttatgtctggctttcactttagcctggtccctacctcaagcataaggtaaagattttccatgggttcttttctggtactactacctgccagtgtggggtcatgtcctagtctatcttgagggaatccccctgttcattattgtcagagtgagactgttaagtcttgatttccctggacaacttcactgcatgacttaatatgatttttttaatagaccctttactgggcaataaattatatagttatctgagtaagcgatatggtcaggaagaggcattgcctcattcagcttttctctttggtgaacttgcatatgttctcctcacccgccagtcacctctaaactgcattgttccaagacaacaaacagaactcgaatgtgtatctttcaccactggatttgtgtttgctccataaagcttcatgcttaatagggttgctgttagcattttctctatttattttcccataaaatatcacaggccttcttcatatggaattatgggtgatttccttcaatctgcataatatcaagttgaggttcatgttgatgaaaagtaaaacatacgtttaaaatatcagtagtgatgttttcccctcctttttagcacatgtgcttgtgatacaagcacattttaatacaattgtagtctcatgctttgatcattcctaagatgaaaataacatttttagataaaatatctgagtcttatgaggcctttagtatgtgatgtgatagaatatcagaagaccatactttttttctagttttccgtgcaattctatcattgtttcatctttactcctaccagagtaattttccaaaatagctatcttgtcattcttcctgttgttatcagtaaataagtgaaatgaaaagctagattatataatttatctagaacaagaaagtagaattgaatctacattcattaatgagactaaccaattacacagataggcattgtacattttgaaggtcatatggacccattgtcagaaatattattatttatgtctatatggacatcacctgtgcatatttacatagaaatcaatgagagctgatttttatttttatgatatatattttttgagatagggtcttgctttggtgcccaggatggagtgcagtggtgcaatcactgctcattgcagcctcagcctcccaagctcaagcaatccttccaccttggcctcacaaatagctaggacaacaggtgcacatcaccatgcccactttttttttttttaacttttgatagagactgggtcttgctatgttgcccaggtttcttttgaactcctgggctcaaagaatcctctcatttcagcctcttcaactgctggtattataagcatgaatcaccatatgggctggaagctgatttttaaaatactgagatcatataggtgacagcaactgaaaaatagacaacaccaagctttatgttaaaaagtgtgagggtatcaatattgttgtggctattggggaggaaaacattagtaaaaccagtaagttaaagctcttgctttaaactttggctttaatttagcaaatgttctacggagtgacagtatgtatgtaaccatgctatgcccattcacagatgcagtagagggaagaatttctcaaagacaactgttctaagattgaaattaaatcgtactgggtttgaaaagagaaagtccaggaattaccaaatattttagatatcagataaaaaagattgcgaggtatgcgatgataatcagcaatggttgttcacacaatgcatcaaatcagtatttgaattagcttttgaattccaaggacaaatggatcaagtctagactctttagtagataaatcttattaggctgagatgtgttttcccctgtttttccacaaggagattacaaatttgcaaacctcagctgctctcattttatgctttcaccaagtcaaaagctgaagttcatcaatcagtgtatctaagtgttcactggttatataccattttgtagtttcagctatctttccaacttcctaaatcatcaccttcatttgatcttgttttttcccactatcacttctttattgaccatataaagaatataagtaagttcttatcttgttattgttcattttagtctaatttcatcaaaatatcacaatctttgaatttcattttaatttcaaagattaaatgaaacctacatcgaaatgagtgtaagatttgcatttgcattcttttggcatcaatttgctatcctccctcatgcacatagagatcatttccatgtacgtgatttcaaacatccaaatgcagtattaaaagcagttgtaaattatggttcttattttcatgatacaattacaatataaacttcctcttgctgctgtaaccaattactacaaacttcatatcttacaataaagtgaccgttaatcctacggttctgtagttcagaagccttaaatgaaactcacagggctaactaacgtcaagttttgggcagggctgcagtctttctgagggctatgtggcagaatctatgtacttgatttttttcagcatccagaggccacttattccttggaacatgacctcattcttatatcctatttttcttttttttttttttttttttgagatggagtctccttctgtcatccaggctggagcgcagtggcacgatctcagctcactgcaacctctgcctcccgggttcaagtgattcttctgcctcagcttcctgagtagcttggactacaggcacttgccaccattcccagttattttgtttttgtatttttagtagggtaggggtttcaccatgttagccagaatggtctcgatctcctgacctcgtgatccgcccaccccagcctcccaaactgctgggattaggcgtgagccaccgcgctgggtcctcattctggtatcataaaagtcagtgatgttgagtaatttctcatgccaccacctccaaggttgcctttcttctgccttcttctttcacttataaggaagtttgtgatttcattgatcccacccatttaagataatctatcatttttccacaaccttaatttcacttgaaatctaatttcaaactgccgtgcaaccaaacatatttgtatgttagactctgggaattaggacatgaaaatttttgggaggccattcttttgcctacagcagacataatctatttacctgcagattaaaacgttctttatttttctgcctccctcttttaatttttttagaataatatgaattgtagtaaagagaaagaaagaaaagaaaacaaagaaaaagaaggaaggaaataaggaaggaaggaaggaaataaagacgaaagaaaagaaggaggaaatgagagaaggaaggaaaggagggagggagggaggaagggagaaaggcaggaagggagaaaaaacaaagcatgaacacaagaaagaatgaaagaaagagaaagaaagggaaagagaaagaaagaaaggaggaagggaggaaggaaaggaggaagagagaatcgtaaaagggaggaaggcaaagaaacaaagaaaataaagaggggaaggaaggaaaaagaggaaaggaagggagggaggaaggaagaaaaggagggcgggaggaagggagaaaaaaggaaagaaagcaagaacgtgagaaagaaagaaataatactagaaaagaaggaagaaaagggagggagaaaggaagggagggacgagggaaggaagaataagggaaagaaagaaagaaggaaagaaggaaggaaggaaaaaaaagaaagaaaagaaagaaaggaaaagaaaaaagaaaagaaaaggaagaggaaaagaagaaaggaaggaagaaggcaagggaagggaagagaagagaaaggaagatggaaagaaggaaggaagaccgcaaatattagaaattctgggtttgttagagaatatgccaaactgttttttttttcacttgaaaggaaagagtatctgccattgcagattggatgtcttgttggtgatattgttgttcttatcttccacatgtttattgagtttgtgcctagtctttccattactaagacaaaagtgttgaagtctgcaaatataattttggatttttctagttcacctttgatttctttcatgtttttcctcatgtatttggaggttctgttgttagctgcataccctaattagtaggatgtttacatcttcttgagaattgatgattatattatctattatctctcatctctgatactatttcttgttctgaactctgttgtgtctaatatcaacgtagtccatccacagctttattttagtgtttccatgatatggcattctccataccttgatgataacctatttatatctctatatatttggagcacggtataaaatttagacttgatttttaaagagttttcaagatgtaattcttatttatttttgttctatttgaaattctctgagtttcctatatctgaagtttgattttctgtcacttcttttagaatatttttggcagttgttttgaaaaatatttctttggctctattattttttcctcttttctttttgggatttcaatcataactagagtaggtaatttcatctcagtcttatgcaggtactttttctcaaggtctcaggaatgtagccttctcacacttctgttcttttcctggctgtgttggtgaactcagtgatattcctccttcacttcaagagcagttttgttttgtttttcctgttttcatactcccagcatcgggagtattctaagtgtggcagtttttgttgccttcccctacatattaagtggaatatcttggtctatttggactcttataacaaaataacataaaccgggtgactaaaaaacaacagatatttcttttttcacacttcttgaggctgtaagatctcatgtcaagatgctcacaaattcagtgttgatgagagcccatttcatggttcatagatggtgccttctttctatgtcctcacatagtggaagacacacaagaactccattgagcttattttataaaggcactaatcccattcataagggctcggcccccaagacctggtcatctcccaagtgttctgctctccctgatctgtgtcatatacagactttcttggattccttaccaattgcttgagagatcgcagtgggtttgtggggaaaaagttttcaagatgatggatctttccaaacttctgcagctgtcagctgtctcccaatctcacaagccccactttgtctttaggaatttattgattattccagctttacttgtcatagtggtatttgcatctgtcctatgtaagtgcatctgtcctctttctccttgaagttgcttgctttccctcatattttgactcagttcttggcaacctggttgctataaaaataaagtcatgactttgaagttagtttcgttcttacattgttgtcaggttaggaaccctattccatcccagatcaccaaaacccagagttttttgagggttgaaattttaggctttctctttgaattgtagttttatcttctttcagttaccatttgcattttcataatgattaatgagactaagctttttttgtgtagttgactgtacctttggatttttttcccaaatcccttttcatttcttattttctttgtggttttagaaaatgtagtttacataattgcagtttgattttttactcagttaatggcatgcttaatggagagaaaaaatattaaatatatttccctttttaattactgtgcttttttcttttttaaggaaatatttcattatgttaaatttcagtgttattctacttagctattccataaatattatagtattttggatttcatatataaatttgtaagatatcctaagtttattatgtagagagtaaggctattttctcttttttgtttttcaaggtaaaaatcacaaaatataaaattaataacttaaccattttaaagcatacaatgcacttgtttttagtatattcacaatgttccagggcaatttcatcatgtcccttccaaaaacccattaggtataaagttgttacaccttattctgcttccctgagccctaatgaccactaacctgatttatatcccaattgatttgccaattcctgatgtttcatgtgaataaaatcaagtaatatttgtccttttgtgcacttatcataatgctttcaaatttcacccatattataccatatataagtacttcattcttttttatagctgaaaattgggtgtccatttatgactcaacaagcatatggattgtttccactttttgactgtatgaatattaatgttgtaaatatgcatgcacatgtttattttttgagcacctatgttttgtaagattaacagctgacttaagagaaacaatggaagacaagaggcagtagaaaaatatattcaaacgatgcaaaggaaaaaaaactgtcagccacgaattccttatccagcaattatttttcaaaaatgaagataacacaaagacttacccagataaacagaaatattaactgaagttgttgctggcagacctaccatataaaaaaaaactctaaaataaattcctaaggctaaaagcaagttacacaagccagtcatttgaatccacatttttaaaaaagcactggtataggtaatattaacattataaaaacagtagaaatgcatgttttctctttatcataaattgtttataaaataatatgcatataacggccaggcacgatggctcatgcctgtaatctcagcatttcgggaggccgaggcgggcatattacgaggccaggagatcgagaccatcctggctaacacagtgaaaccctgtctgtactaaaaatacaaaaaattagctgggcgtgatggcgggcgcttgtagtcccagctactcgggaggctgaagctgaagaatggcatgaagccgggagatggagcttgcagtgagcggagattgtgccactgcactccagcctgggtggcagagggaggctccatctcaatgataataataataatatgtgcataatgtattgctgagtatttgacatatggaaatgtaatacgtctataacatattttccagtaacatcaaaaaggaggtagttggaagaaaaatgtattgtgataaggtaatcactctagatggtaaagcaataattactaaaatatattgttggctttgtaactttaatagatgtaacgtgtaaagtgataatactttaaaatggaggaaataaaagagatttgtataagaatgatgtttctatgtattactaaaagtttactggtataaattggaagatgatttgaataactaattttccatatacctatatggtaaacttacaacaaccacaaaaattctcaaaaatatatagtaaaataattcattagtaatctagagttccctattttagaaaatattcattcattgcaaaataaagaaagaaaaacatttgagaaatatacacaacaaacggtaaaatggcagacataaatagaattataccaattataatattaaatgtgagcagattaaaatcccttcaagaggcagagattgtcagactggattaaaaccagtgatcccaatatacccagagatgcaaggatactaatggattgaaagtaaaaagatgacaaaaaatatcatgcaaagagcaataataagaacactgaactcattatactcataacacacgagatagactattaaaaatgtgaataggattttaaatatttatattgtagtaataaggaggtcaaggcttttggaagacatagctattacagtcatgtatgcacagatatcagctaaattgtttcctctatatagatgctgaaatcctaaccactgaaaatgacctcattagaaaataggttctttgcaggtgattaagttaagataaaatcagatgagcctgaattcaatatgactgatgtccttataaaaaaaaaaatgagtagagggagacatacacacagggagagtaccatgtgattatgagggcagagattagccaaggaatgctaaagactgccactaaaccaccagaagcaagaaacaaggcacagaacagactttctctcatagcccttgaagggaccatccctgctgacacctcaatctcagacttttagcttccaggactataagactataaacgtatgttgttcaaggcacccagtttgtgttagttggttatgggagccctagaaaactaatacatgaactaataacaaagcataataacatgaagaaaaaattgacaaaagaggagcatcagcaaaacggcagtggagacagctgcaatctttcatttccccacagaaacatcacacaactaagagaaactgtccgaataaactttgccaaaactctggaaaatggtcaaaagattacaacaaccaagtgaaagcagactcaagaaaaagacaacttgaaaactttatgacatttttaacttgcctttgcagcagcaaattggcagttttgaagtgtcagaagcccacgttcccagtgaggaaccctggtccatgatccaaaggaacaagagaagatcttacccgcaaattactatgtgtctgttctgactggtctgggggatacctaaaggactcatgaaaggcttttgttttttctgtgttgctagaatacagaacagataaggaatggacattatcaagaaactctgcaaggagacctaacaaaccacagatgtttagggcaaaaattagagcttacacatatagtagatcaccttcagcacaggaagaaaagttggagaagagtatttggaaaactaagacattcaaaatcattcacgtacacgagagagtctagaaagtcacatgtatgcataggttaagtcacatgctgacaaatgtcataagaagaccctacacttttaccttggccgatccctctcctcagtgcaagctctgtgcaagagtgaacttgaacttcactcagtgcaagagtgaacacacactttgtttcggctttaaagaacccagcacgaagccagtctgcatggcctagagacatattttgctggataatgattacttgtttttctttttgtgtttgttgtatttgccggtttgcttagttcctgacatacaagaaaatcactgtcaaaacattagcttaacatttgtcaaggaaacaaaaagacttcggtgaccacaccttataaagcaaacagttttgtaaatcactttggaaatttcagtaaaaaaaaaaatccttaacaatataataagtaaagaaaatttaaaaccccaaaacattactgtgtttgggggggggggggttctgatttacagagtaaccacacagtaattataattattataatgcccagttttcaaaaaaagttccaaggcatacaaagaatgggaaagtgtggctcattcaaaggaacaaaacaaactgacagagaatatctctaaggaaacccagacttcaaaattactagacaaagactttaaaacaactctcttaattatactcaaatgtcacaaggaaaacataaacaaagaaataaaggattcagaaaaaatattaaaatgtaggaatatcaacagagatagcagaaattctggagtggaaaactacaacgataaaaatttcaaaatcaccagagggatttcagagtatatttgcacacacagaagaagtcatgagattgaagatgagaaaatggaaaatattgactctgagaaacagataaaaaatgagcagagactaaggaatctgtgggacatcatcaaatagaccaacattcatactctagaaggataaattatgttgttgaaaactttagcattctttctttccacctttcttcctccctctccctcctcctctttacttttcttcctcttcctttctcttcttctttctctccttcattatccctttcgctctgtttatctttctccctttctcttttttcttttcgttcaattttctccattactaagagatgtttaaatacccttaccatgtgagttgatatggttatttctccgtttaatcctcttttgagatttacagtcactctaagtaaagagattacccaaacataagcctcacaaacaggcttccataccattcttaatttggtcctgtaattcttcattgctgtattaactttctgatgcttttaaggatgttttataacaaattgtttagttttttccactggaatgtttattctgaattatctaattcatattgtaaatatagagggagtttaatataaaattattaaactaatatttatgaaagaacgtatttgtgcatttaacaaatatgttaatcctcagactgttattgggcagctgagcatacagcaataaaaataacaatttttatgtgtataatatttatggaatacgttacttgaacaaataaataatttagttaataacatgacaaagaacagaaattgtatacactatagagcatagtaatggaataatgaatgattaaagttattaatattaggtagaaaatgaagggtatctttgagagcagatctcaaggaagcaagcaatttgccttatgaggaaagagttacctgtggataaaggagaaactgaaaaatttagaagtcaagactttttgagcaaaaacaaaaatatgactattagtcaccaattcagtacagtgaaaaaagagttgaagagatatcttggaagtaaaccatgttgtggaagagcatgtagggttttgataatcatgggattattctgaattaattttaaatgcgataggaatatatgagatactttcaccagagaataacatgattgtgtttgcatttcaatgaggtgtatctggtgcaccgtgtagaataaataggttatgtgagcaaataaattgggaggctattgtaatccagagaaaaaaggtagtgacttaggtgagaatgctgtcaggatgagtggtattagtggttagaagttgttaggccatggatgtatttcagaggactggccaagagaactgcagctaaattgaagtgtagggagtgaaatggagaactcaaagatgactctcagcactggaaggtgacagctgtcactgaagcatgctgatgactcttattaagtgagttacttgggaatggcaagatcaaaacttctcactttcaaatttatgaaaaatattgttttcagaacgaatgactttgggatcagaaagccatcattctaattgatggttccaagactacacgggctcacactcccaagagcaaaagtaaatcatcacaaaggtgcttcctgataattctagagaatggagaattactgtaacatctttctgattttaggagaggtagcagttccctgtttagcctaaacgctattttttttaaagctcagccaagagactccattataattttcaaatgtgtgtaacttaaattctcatatgaaataccactatgcttaaattagtcaaaacattttccccatctacaactctatcttgtcattgcaatcattttcacaaaagtgactgcagctcacagaccctaaaaggagaaaatccagggtaggttatctgatctagttagtttggaagacaggatctagagattatttaatatgaaataggtcacctgaaatgaagtgtttactgaaaacagcttggatcagccaagttttctaccactgaaccatgcatttggtttaaaaaacacaacaactctggggaatatcagctgcttccaactgtgttgaaggtgttaaagaaaagagcataaaattaaaaatgatcatctgaggcctttatagtctctgctcaagagactagaatcttccattcttaacgaaacacccaaatatcttaataattgggcaaaatcgaaatatcagacagataattttatcttgaagattgttaaattatagtggtgattcactaccttgccacgtctctgactcaaaaattaggtctttgtttaggaatcaatggtactctgcaacttggaaataggaagattttagaagactcaaacattgactttcttgtgtgcaaaaaaaaaagacgtattgagataagacaagtctttccttgcaaggatacctctaatgttcatacaccacctcccctaacgttaatatagcttccaggtcactaaccagtgtcagagagcagcccatgcaactacaaattcaatagatgtcgaacacagggtcaagcctagaataagaagtctcagctaattaactatgcttttttccccaaattcacattaagaaaaacttggatatgtcagagaatgcattctaagttcactcagcctaggagggagaaacaattttaaattaagagctgaagcattcttgtcctaacagaaagcaaggaaaacgaaatatcacaccacaggagggatttcacaaattagtgtcaacatcaaaaccttaaaataggcaaggagaatacagattcacaatgaactcttgtacttgttttgttcagagaagagatggttctgagagaatgacagtgaactaaccccagctggtttagttggtgctttcaactgctgcttctgatcaactcctttagctagaataaattgatgaggattttggcatgtggtattagagatggttcttttttcctcttatttgcattgttcaatgtagtaaatactagctgtatatggctacttcaattcaaattaattacaatgaaatatacttcaatattgaattttttagtgactgttggttcattattgaatatcttcagctaagatttcccatctaaatacactaagaggtggtttagttaactggtcgtccacaaatattgacgctgatgttaactcctgatatattctctgcaaatagaatattcatgagcctcctcctgaaatcagcagcctagagatagttttataaattggataccagttggaaatctatatactctttaagtttttgaaatattagcttcccagggaagaaaatcaaattcatgagatatgttaggacaatttaactcaagatgctcaaaactgaaatgatgtattctacaatatgtgataaaaccaccccctaacaacttaaagcaaaacagggattgaccttaaagacctgccttttcctcatcccccagccagttttcaaatcttgcattttatttccaaaggtccttatctccctagtctcttgtttctagactcggcacatatttaagtttgttacctctatctactgacttttctcttttcaaacagtatctatgcctgccaaatgtgaacatataaaaaaaaaccagaatgtgccattctgatttaaactgcttattagttaaaaccctcaagataacatctgggttcttagctgcaatgagtcaagcctacttacatctttttttgtctttggctgcacatttcctatctcatcacactccagcaaagccaagctgtgccggccttctacaccagatccactattttgccccgcgtcgccgcggatttttgcccccccgccgccgccgcgactttttgcccgccgcggctttttgccccgccatggctttttacaccccgccgccgcggctttttgttccctgccgccgtggctttttgcctgacccggctttttgcccccccgccgccgaggctttttcaccctcgccgacgcggctttttgcccgccgcggctttttgccccccccgctccggtgtcgcggttattttgcccgccgcggctttttgccctctgccgccgcggctttttgcccgacccggctttttgccccgccgccgccgaggctttttcatccccgccgccacggctttttgcccgccgcggctttttcacccccgccgccgcagctttttgtcgccgcggatttttgcccccccaccaccgcggctttttgccccccgccgccgtggctttttgacgccctggctttgctcccccgccgccgcggcattttgcccaccgcggatttttgcccccacgccgccgcggctttttgacgccgcggctttttgcccgcccggctttttgacgccgcggctttttgcccgcccggctttttgcccgccgcggctttttgcccccccgccgccgcggctttttgcccccccgccgccgcggctttttgcccacccaccaccgcggctttttgcgtgcctcggcttttgcccacccaccaccgcggctttttgccccccccccaccgcgtcttttcgcgcgcctctgcttcttgcccccccgccgcctcggctttttccccaccgcggttttttgccgccccgcctcctcgggtttatgcccgccgcggctttttccccccgccgccgcggctttttgccaggcgcgactttttgcacccccgccgccgcggtcttttccgcgccgaggctttttgcctccgcggatttttgcccgccgcggctttttcgtccccgcgccgtggctttttgcccaccacggctttttgcccctccctgccacggctttttgcccccccgccgccgcgactttttgcccgccgcggcttttccccccccccccccgctgccgcggctttttgacgccgtggctttttgcccgccccggctttttgccccccccgccgacgccgcattttgcccgtcgcggcttattgcccccctgccgccacggctttttgccccatggccatcctcagaagcgttgagtggaacggagtgaagggaaaactgttttcttctaaagctcaaaaatcttgaactttcaaatagggctaagtgttatttttgctccaagcacacatttgagaaatcttccatttagcggatctgatgataaacccacattttttgtttgttttaatctgaaaatgtatttctctgcttcttggaaattttttttgcatataagattatattttatcatcttatttcaagttttatttaccatttgatgattactcttaaaatgtccttgattaaagaatcatctattgctccaactgctctttactaaaggtaatttgtcttttcaacctcatcaggctccttttaagctctcaaactgaccttattttttttttacagattcaatgcattaagtcaatttattatttatgatgaatttatttatgtatttattttcactatcacaagtagaaaaagcctgtaagttgctatgccaaaagcctgcctctagatggcaaacaaaccccacaatacacaaaaaagagccaaattcttagaaaccctgggaaaggaagaggactactgtcccattaacaacttggagcccttaaggcaagaatgaggtggaacatctgggaggagacaccagggtgcggagtagtggggaacctgctctgtgcgctgagactgaaagcccagccttgcctctcaccgctgccttgactgtgtccccatgtgctgtgaagtgaatggtgtcttctaaattcatgctgagccctaattgctgaaaagtgtaagacatgcaatgaggggattatgtgcatcttcccgacaccaacatgatgctcaggaaggagacttcttgttttctcttaggattcttttactaaccaagattttgcctctactgcatatttccctttgctgattgtccctcccttttgacagaagatggcccagggcattcactactaagtctcaacctcttacccaaagccctcagtctagtgttgctctttccttcatgctatttttgtttgtttcttttcttgtaatcatcttggcaataaaataatcagttttttctttctacctattaaagatgttaccttagttaattacagtggtttccttcagaatgataaatggtctttcaaaatgatgtagagagatctaaatccgtgtgctccagaagttgaatgaagatctgtctagcacgggtgccagtgactctcccagagtgctccatgcagctggccccacagagtccctctgtactgtcatatcacccactgccttctgtgaatgagatattctgattagaatcctggtggatgctatttgagccagtgcccccacaactcctatgaaagccgaggaccacaggcccctgaagacaatcacaggtctctagactcacagctcatgaccgtcctctgcagacacagcttctccctggatggctgagggttgtcattggctgtgtccttccttgtgcatgacaacaggagacatagaaggtctgtaagcagccctgcaagccaggttctgagcaagccctcctgtgtggggccctcttacctggacataggtgtgtaaaccaaaaatgaaactctaagctccctaaccaactgaatgaactcctcctctcaaccaaggacacaccaaaatcaacctgaaatacaatgcagtccatgatcggaacggatgattggatatgccttaacttaccctcttccctttaaaattcaggcacaactgaccagcttttaatatgaagacagaaaccttgagactgacaaagaaaactctttatagcaataagataccaatgtgacagataccacgtcctaagagaaatcaaagtattttccccaagctattgttatttaatgtatttaaaaatgcctctgcaaagctggttcttgtgggaaaaatctacattctgtagagattcctttttaaatctctttcctgacacagagagatttaactaagagtttggcaccttttaagtctaataagaaacaattacaatctattctctctgaagcctgctacctggaggcttcatctgcatgatgcaaccttggctccaaaaccctttttctaaacccagaaactcccttgtgttgattacaggtcattagataaacgctttcaaccacctatgaaatctctgaatccacctatgacctggaagtccccaacatcccccctccttcgggctgtcctgtctttccatatcaaagcaatgtacagcttacacgtattgattaatatcttatgtctcccgaaaacgtgtaaaaccaacctgtagcccgacgacctttgacacacgttctcaagacctcctgaggctgtttcactgatatttctttaactttgaccaaataaatttctaaactgattgagacttttctcagatacttatttgtttataggtatcactggatacacttaaggaattgaagagatttatgacattgagaaaaggaggaagccagggtgtatggagagagagagagagagagagagagattgtgatgtatgtacaggactaacactgagacctggttatgtaatggtgtagtactgagtatcatccccaaatagtgaggtttcattccaggaagactatacatgtatctcatttgggaaaacagcttttgcaggtgtaaattaaggagcttgaaacagggagatattcttagattaatcaactgggacttaaatgcaaactcaagtgtcctaaaaaaaccaagaggtagagagacatttagcatagactgaagtggagaaggcaatgtgaacacagagacagagattgcagtcacgtgtccacatcccgggagagagaagccaccagaagctggaagagctaaatcagactgccccctacagcttcagaaggagccagaactgatgactccaagatcttagcccagtgaaactgatctggacttctgaactatgagagattccattcctgttgtttgaagctaccacatttttgagaacttgttacagtagcccgaggacactaacacaaatggggctccgggaaaatccagactaaaggtgttgtgttggtttgcaatctccttgcttaactttctgatactagacgtaaatagattggtgaaaaattttgtgattgaagaaatgtacatgaaacctacagtgtacagagaagcatctgttagttataagataaatattgataattttagttgaaaatgacatatgactgtcaatatctcacataacattctgagttactcaagaatgcataaaaggggcactagatactcttctcatgtatgtgtgtgtgtctgtctatacatgtatgtacgcttcatggtgcatcagttggcggaaccctcaggacaccccttcacatcctcagtgacccatttcacacatgaggaaactgttcatgacagcacatggctgatttgcataaaagtcacttggtcagcagttgttgaagctgaacttggaatctaggtctgtctgaccttaactatgttccttccacagagccacgttcattccatagaggaacccaccacctataaaaccaggaaagagacaaagccagaagtgcagggtggatttcttaacaaaggtcactgcgacctctagtcctcatcacgctgacactaagcttaaacccagacccttctacagttttgtctacaaagcacaatttgcccaaagtctttacaaacaccaacagcctttctttcagatatggcagcagggtcacatcttacacggccctgaccacattttgtctcctctgccatccccatctctctgactcagtcctcgcttgcagccataaaaaaggatgagttcatgtcctttgtagggacatgtatgaagctggaaaccatcattctcagcaaactatcacaagggcaaaaaaaaatcactgcatgttctcactcacaggtgggaattgaacaatgagaacacatggacacaggaaggggaacatcacacaccagggcctgtcatggggtggggtgaggggggagggatagcattaggaggtatacctaatgtaagtgacgagttaatgggtgcagcacaccaacatggcacatgtatacgtatgtaacaaacctgcacgttgtgcacatgtaccctagaacttaaagaacaataataataataatcatcatcataataaaagaatgagtcttgtacatctaatttgccccacaaatgttaaaacagcaaacctgcatccccttcctcttctcatgtgctgtgagggatgacctccaggctctcagatatttctaagatatttctcagttgctattctcatgggccaggagaaaacatcttttgtgaggctagctctcttatatcctcatactctctcccccacatagcattttgtttctttgtaatcctttgctgctcctgagctacaggatctagaaaataattggaaatttaacagtgaaattaatttctcgctagcatttgcctttatgagactgaaacagtgtgtgctttcatctgattgcaatacatgcctgtatgtgtatgtatacaatacacacacatataacatatatgtatgtatacaatacacacacatatatgtatgtatacaatacacatacataacatatgtatacaatacacacacatataacatatatgtatacaatgcacacacatataacatgtatgtatacaatacatacacatatatctatgtatacaatacatacacatataacatatatgtatgtatacaatacatcacatataacatatgtatacaatacatcacatataacatatgtatacaatacatcacatgtaacatatatgtatgtatacaatacatacacatataacatatgtatgtatacaatacatacacatataacgtatatgtatgtatacaatacatacacatataatgtatatgtatgtatacaatacatacacatataacgtatatgtatatatacatgcataatatgtacatatgtatatatacaatatataaattgcattatacatacatatgtatataaaaattgcaatgtacgcacatatgtatatatgtatgtattgcaatatacatattgcaatatacatatatacaacgtacacacatatgtatacatgtatatattgcaatatacacatatattaccatatataatatatattatatatttatatataatttatatatataatatatatttatatataaatattatatatatattatatatatatatatttaaaaatctatgtatatatgaatgtattagtcagggttctccagagcgaaagaataggatatatattctcagggagtttattaagtagtattaactcagatgatcacagggtcccacagtatgctgtctacaagctgaggagcaaggaaaccagtccgagtcccaaagctgaagaacttggagtccgattttcagcatgggagacagatgtagaatgggagtctaagccagtctagccttttcacgtttttctgcctgctttatattctggtcacactggcagctgattagattgtgcccacccacattgagggtgggtctgcctttcccagcccactgactcaaatgttaatctctttggcaacacccttacagacacacccaggatcaatactttgcatccttcaatccaatcaggttgacactcattgttaaacatcccaatgaatatatattgcaagaagaaatatatgtgtattttttcttactatattaccatatgtcaactataagaaaatagtgtggaagaagagaagaaaaaccttaatacacacataagtaaagccagaaacatccttgtagaattaggatatataatatatctctatgttttaatcttgctgttttttgttttcccacagccatgtttctaaatatgccttaactaggtacagtacagacttggcaaaaactctttccagtcaaggtgcatacataggtagaattttctgtttcaagaatgattgataaacagatggtgtatctgtcaagattttccagagaaaaataaacaataaaaaatgtgtagacagatggatgaatggatgaatggatggagaaagagacagagagagagagaaatagatttattttaagaaattggcttatgtgattgtggaggctagtaagtccaaaatctgcaggatagaccagcaagctggagacccaggaaagaatgaatgttgcagctcaagtctaaggcagtctgctgccagattccctcttcctcaggagagaaagatgttaggagaggtcagtctttccatccccccaccattaagggcttcacctaatgaaatgaggcccacctagattatggaggttaatctgcttcactcaaaggctactaatttacatgttaatatcatcttaaaaattccttcacagcagaattcaaaatagtgtttgaccaaatatctggaccttaacatgtaaaattaataattacagaaggacagattatggaagacaaagaacacattttttttaccaggtaaagaattagattcattaattttaggtaaactgaaattatcctaaattacttttaattcaaaccaaaagacaaggagagataatgtagaattgtcatgcaaacagtgtcaaaatcatgcaaaactgaggagactcagggaattaaaaaaattaaaaaaaaaacatactaggcaagaattagcagtttactttctggactatgagcctaaactttctttcttatctatataaatattacctaaatctccatttttctctgtcttagcattcttagacatagtgtcactgtcacatagaacaaaacactttaagttttcctgcagataacatgaatctcaaatatcagcagagtatcatctttattgtgatgtgttacagtcaaagaaaaatataaactttgtatccttagtgggattttctttctgaaaaacgctgaaagtctattataaagtgtgtcataaaaatctctccctcagccctagattagtccataattacctagtgatccaatgcgaagtatggtgttattacagaaaactcacatcctcttgcaaaagaagaaatctcagtaagacctaaagaaataataggggtcttatttcacatttgttcttttctagaagaagatgagagctatcttagactcattcaggttctcaaatataaaccaatctctcaaagaattcccagcacttctgagtgcaatataacttacctgtgtcacacacacacttcaatattatatatttttaggacctctccataaaagaactcatcctgatgcctttttaccatgttaatattcaatattgttaactcagaagtatttggttttatagtaaagtcttgtctgattaatgaggtaattatttacttttatatacttaaaaatactctgacttctttactatctttaaaggtcagataaaaatgctggaaatttgaaaatatgggtggatataataaagcaggtttaggtttctgcactatccagacaggagtccacatgtgttgctctgggttcccatggtaacttaaatggaaactttcacaatgtcgagagtccttgatgtcctgcaaatgaaggaggaggatgccctctagttcctagtagctggaacctgctaggtggcaccaacccttccaaatggaacagtacatctataaaaggaaaactgatgacatctacatcctaaatctgaagaggacctgggagaagcttctgctgacagcttatgccattgttgcccttgaaaactctgctgatgtcaatgtcaggtcatccaggaatcctggccagtgggctgtgctgaagttcgcttctgccactggagctactcctattgctggtcacttcactactgaaatcctcactaaccagatccaggcagccttctggaagccacggcttctggttactgatctcagggctgaccatcagcctctcacagaagcatcttttgttaagctgactatcactactctatgaagcacatattcttctctgtgctgtgtggacattttcatcccacacagcaaaaatgtagctcacttagtgggtttgatgtggtggatgatggtatgagttggcagtgtccccacccaaatctcatgttgaattgtacttcccataatccacacatgtcatgggaggaacccagtgggagataattgaattggggggaggtttcccatgtcttgttctcctgatagtgagtggtgctttttccccttttgctcggcacttctccttgccgctgccatgtgaataaggatgtgcttccttccccttctgccatgattgtaagtttcctgaggcctccccagtcatgccaaacagttagttaattaaacctctttctttatgaatcacccagtcttgcgcatgtctttattagcactgtgaggagcagagttgcttgaacatctatgataacttgccacagctctagttaagggcacattcagaattcaaagccaggaggagtccaaggccaaaggccacttcatgaccattataattctccactcccaggcagtatggacagatatagaaattatccattgaaagtttatggagtcagagaaatttcatgaattttacagttttttttatttagtaactagcaggattttgttaagattaataatttgggctccagagccaactttactgggttcaaatacacttattaaaaataaatgaggttatacattactgagtggtaatgtaaattgacaaaactttcctgagtaaaatgtggtaaaatgcatcaaaagctttaaacatgttaaaatcattgtcccaggaattttacttatagtttcatttaaagaaaatttctataatgtacacaataattaattacaaatgcatttaatttcattgttgttttgaaacaacctaagtgtacaacaataggggattgattaaatgagtaataggaacttcatatatcacaggggaatgcctccttcctcacctttgttttgtggcatcctccgcagtctgcctggcttccttttccaccacttcctcatccccagagcagaggaccaccagctttacagtggttggtgtgttacaggtattgggtagacatgatcaaagtttctctgcttggagaagttgcttcttttcttctttcctctagccagggccagtgcagggcagggatttcctgctccctggctttaagctttccctgaagtgggttcttctcacagctcaacaaacttccaaaggatgcagtgagcaagccaattttttctctcattgtaagctgtgcctgccaattgtgccttaattaggaatagggtgatattctggttctccacttgctgtctatttttcaattgaattgggtagaaaagacaggtgctacttactgagtgctctcaaagaccctcaaaaacactgaggagaatattatagccattaaaactgacatatgaaaaataacatacttatggttggaaaaggtcatgacattttaaagcaaaaaagcaggttacacaaaaatgtgtaatacacagttaagaaaactggggggatagcaatacattgtgtttatttttctcttgcttattctgcattctctaaatttttctacaaatatttgtgttgttaaaaataagaataaaaacctatatttaacaaaacaatacaacaaaggaggagagtttatttaactttatgagtctcagttttctcctcccctaaaatccaaaataactctctttgggttgttgcgaagacttcattgactgatctatgaaaaagggcttgcaattgtgtgcgtcataggtagtgacctgttttaaactttcagtctcattttataactataattttgataccttcccaacttggcctagttatagtgtaaaaactatagattccttttcattaattttaatagtcactaccactttagtatcaattatacaagtgcaaaacaaaaacaaaaaatcgttattcaattgcctgctgccaatattggtgagatatttgacctctaggctcaattatgattttgtttcataacaacagtattcaaaattgttcaagatgtagctggcattataaaattttagatgattttcttccataagccaaaggtaaattaagatttctttcctcttcataaaggaaaaaacctattttcagagttaatatgacagtggctatggctatagctctcttttacttcaagaaaaaaaagtagagaatggtatggtgtatttggtataaataaaggaaacatgaggatgagacagaaaacacgttcaagaagaagtaatcttctcccctttgacagccaaaacacaggtacatttttagcctcatttggtttctaagacagttctttttaaacaaagaaaaaaaaatcatgttttgcaccctcagtctcttcaatgcatggtaaatcagtagcaaagtaatgatgaatgtggaaattaatcaaaagcaaaactatagtttttacacgtttcttagtgaattaatgatttccctttattacagtaaatgtgtcaagaccataaaatgtgaacaaaaatttaaagtgtaagattaaatgctgttgaaacttcgcctgacccttattaatgcaacactgggcttaagcagaaacctggaatagaaatagaaattataagaaaatgttacagccagaaattttccagtaaaggcctaaaaaaaaatgaagtaaatgacaatagctttaaaagataagtcaggggaagagccatcacaattcaattttaaacaaggccaggggcagaaaatggtacctataaagaatcaaatgtaactgagaaaaataatcttgtaataagtcaaagagtggttttgaaggagaagattcaataatccagttgttagctcttagcaggaatccattaaaggagacatgcactaaatgctctgcttgagcaaaagtatgtttcttaaggtagaaaagttaggaacagtgcaaatgctttgactaaatgaactgatcacattggtcaaacaagaacgttttggaaaactatacatacttcttcaaaatagaaaaggggagtagggctattcggggaaccaatgactcaaaaattcccatggaaaataagtgtgcttaattttattttttaaatgtatttttagtcccagtatgagcaaggctctacaatagattctgcagaataaaaaagtagaaaacaagtgggccctcttgttgaagagttcattgcctagtacaaggtgtgaagatgcctggaagagggaggaaccagctctacctagaagttagaaaacttttcctagctcagggtgtgagacaagaagacaagttttaagtagaagggtttccaggctgagagtctaacataggcaagacatggagtcatgttctaggcaggctgattatatattcctgattaacctgcaatataagaagtcattgagaaagtgattgaaaatataacaggccagaaatgcaggtgagaggtaattaaaaactttgatgtcctggtaagaagtttgaacttaaacctacactagttgcaatccacttatgcagggaaatggaatatgttcagcaccatggtttaaaaaaggttactctgatatcagtgaaaagtgagacagcctattgtaatgttgaaaagctcatgctttagagagaggcagatctggacccaaatcatagccttaatttaaacctttaagccctaagcagccttcagttttttcatacttaaaagttggataatagtatctatgcttggagtacgggggggtaagggagacggtatgagtgttaagagactaatgagacagaaagttaacaaggatatccaggaattgaactcagctctgagccaagcagacctaatagacatctacagaactctccacccaaatcaacagaatatacttcttctcagcaccacatcgcacttattccaaaattgaccacatagttggaagtaaaacattcctcagcaaatgtaaaagaacagaaattataacaaactgtctctcagaccacagtgcaatcaaactagaactcaggattaagaaactcactcaaaactgctcaactacatggaaactgaacaacctgctcctgaatgactactgggtacataacaaaatgaaggcagaaataaagatgttctttgaaaccaatgagaacaaagacacaacatactagaatctctgggtcatatttaaagcagtgtgtagagggaaatgtatagcactaaatgcccacaagagaaagcaggaaagatctaaaattgacaccctaacatcacagttaaaagaactagagaagcaagagtaaacacattcaaaagctagcagaaggcaagaaataactaagagcagaatagaaggagatagagacacaaaaaaacccttcaaaaaatcaatgaatccagaagctggttttttgaaaagatcaacaaaattgatagaccactagcaagactaataaagaagaaaagagagaagactcaaatagacgcaataaaaaatgataaaggggacatcaccaccaatcccgcagaaatacaaaccaccatcagagaatactataaacacctctatgcaaataaactagaaaatctagaagaaatggataaattattggaaacgtacaccctcccaagactaaaccaggaagaagttgaatccctggatagacctataacaggctctgaaattggggcaataattaatagcctaccaaccaaaaaaagtccaggaccagacggattcacagctgaattctaccagaggtacaaggaggagctggtaccattccttctgaaactattccaatcaatagaaggagagggaatcctcccggactcattttatgaggccagcatcatcctgataccaaagcctggcagagacacaacaaaaaaagaattttagaccaatatccctgatgaacatcgatgcaaaaatcctcaataaaatactggcaaactaaatccagcagcagatcaaaaagcttatccaccatgatcaagtgggcttcattcctgggatgcaaggctggttcaacatacgcaaatcaataaacataatccagcatataaatagaaccaaagacaaaaaccacatgattatctcaatagatgcagaaaaggcctttgacaaaattcaacaacgcttcatgctaaaaactctcaacaaattaggtattaatgggacgtaactcgaaatagtaagagctatttatgacaaacccacagccaatatcatactgaatgggcaaaaactggaagcaatcccggtgaaaactggcacaagacagggatgccctctctcaccactcctattctacatagtgttggaagttctggccagggcaatcaggcaggagaaggaaataaagggtattcaattaggaaaagaggaagtcaaattgtccctgtttgcagatgacattattgtatatttagaaaaccgcattgtctcagcccaaaatctccttaagctgataagcaacttcagcaaagtctcaggatacaaaatcaatgtgcaaaaatcacaagtatttttatacaccaataacagacaaactgagagccaaagcatgagtgaacgcacattcacaattgcttcaaagagaataaaatacctaggaatccaacttacaagggatgtgaaggacctcttcaaggagaactacaaaccactgctcaatgaaataaaagaagccacaaacaaatggaagaacattccatgctcatggataggaagaatcaatatcatgaaaatggccatactgcccaaggtaatttgtaggttcaatgccatctccttcaagctaccaatgactttcttcacagaattggaaaaaactactttaaagttcatatggaaccaaaaaagagcccacattgtcaagtcaatcctaagccaaaagaacaaagctggaggcatcacgctacctgacttcaaactatactacaagtcaatagtaaccaaaacagcatggtactggtaccaaaacagagatatagaccaatggaacagaacagagccctcagaaataataccacacatctacaaccatctgatctttgacaaacctgacaaaaacaagaaatggggaaaggattccctatttaataaatggtgctgggaaaactggctagccatatgtagaaagctgaaactgaatcccttccttacaccttatacaaaaattaattcaaggtggattaaagacttacatgttagacctaaaaccacaaaaaccctagaagaaaacctaggcaataccattcaggacataggaatgggcaaggacttcatgcctaaaacaccaaaagcaatggcaacaaaagccaaaatttacaaataggatctaattaaactaaagagcttctgcacagcaaaagaaactaccatcagagcaaacaggcaacctacagaatgggagaaaatttttgcaatctactcatctgacaaagggctaatatccagaatctacaaagaactcaaacaaatttacaagaaaaaaacaaacaatcacatcaaaaagtgggtgaaggatatgaatagacacttctcgaaagaagacatttatgcagccaacagacatatgaaaaaatgctcatcatcactggccatcagagaaatgcaaatcaaaaccacaataagataccatctcacaccagttagaatggcgatcattaaaaagtcaggaaacaagaggtgctggagaggatgtggataaataggaacacttttacactgttggtgggactgtaaactagttcaaccattgtggaagacagtgtggcgattcctcaaggatctagaactagaaataccatttgacccagccatcccattactgggtatatacccaaaggattataaatcatactgctataaaggcacatgcacatgtatgtttattcacaatagcaaagacttggaaccaacccaaatgtccatcaatgatagactggattaagaaaatgtggcacatatacaccatggaatactatgcagccataaaaaaggatgagttcatgtcctttgtaggaacatggatgaagctggaaaccatcattctgagcaaactatcgcaagaacaaaaaacgaaacactgcatgttctcactcataggtgggaattgaacaataagaacacttggacacaggaaggggaacatcacacactggaatctgtagttgggtcagaggaggggggagggagagcattaggagaaatatctaatataaatgacgagttaatgggtgcagcacacgaacatggtacatttataaatatgtaacaaacctgcacgttgtgcacatgtaccctagaacttaaagtataataataataataataataaaaagagactaatgaaaggactcaggaatcagaaagggagaaagggtaaacctattcaagaaactcaaaagaaaataaaatccaggactttctgagtggtatgaggtggaaaagctggggaaaatggaagatgaaaccgagctttctgttgttggggatggagaaagatggtgtatcattctcttggccacagagactggtagcatttggaatcagaaaggttaatggaagagaaattagaactttcaaaccaaaatttaactataaaatgtgactatgtctctgggagaggagacatgtatttcagagacatcatgtctgcattctatattccacattcttccccaaacataaatatagagaaaaaaatgaaagatgtgaaaaatcacatacagagataataaatgtgcattttaaaacacagtgaattgatgcttgaaggattatgataactaaaaatgatttataaagaaattcaaaaatcgtatttacttttcagtatactattaataatgcaatatttctccatgtttgatttcactgatatttttgacttctttaagattctggaaaacataaaacacggttatgagtaattatgtttttcaatttgcttatctgtacacacaaataatggttctttcaagcatctataaacaatccagtctcaagtacaaatgggtttaaatgtaacatgttaatttgctaaaattctacaacatttcccaagaaaataacagttttagcatttttaccaagtggcttttttatttttttcactgcactttagaagtcagccctgtgcaatttaatctttcaaagaatccttctgctgataaactacagagagtacatgtggctgatttgacccaaacctttcagttaataaatatgagacagaatcttataaaaggaaatgcaatcagaattttcacagaaggtttttcctgaaggataaaaataataatggtgtttgactcacttttatacctgggagcagaagatgtccttgccaaatatctttttggaagagctctagttggacagacacttccaaaagataagcaaagcatgaaagatatgaacatcggacaaaacgaaaggaaatgaaagcatttcctaaagcatttaaaatgatgacataaaaaagtttgtttatatttatcaaacataagttgggtgactttttaaaaatggaaagatgaacttcaggatatttattaccaagctggtccagacagcttgcattcattcatttacttgttcattcattcatttattgttttagttactacttacgaggtgagtctaaaataaggacaaggcaccataatattttcaagcaaatactctctagtttactgtatgcattatttggcctactaaaattagcttgcaataactcatccaaacacagccttactagctccatgattgtttagtggaataaggatggaacatgggagtatgatgtaaaatgggctatatccttgatatctcatgagcaccactctggcacaggcttctaccagcaagggtatcccagtagcagcagacaggcatgaagtttttcatgatgtgcatctgacagtgataccatgtgatattgataagcaatggcattggcatctggaatctgtctcactgggtttggcagaaggacctagagacagtattagatttttttcccaaaagagaaaatggggttttccaatgattaattgaaaaaaaaatatatatatatatacacacaataaaacaaaacaggagtgaccaggtacacatcctatgttggcagaacaggtgaaagtggtttggtgtatttcaattttaccaaaatgggaacaggctgcctatattattttctattttttttctacttaatacatcgtgagcatcttcccatgtctgtgtctattatggtatgctcatttttaagggcaaggaacttctttttggtccaagcttctttttcttctaaagttcaatattatgctgccattccaccaaggctttatggaagataatttccattaatttgacaggtcattgtcttgtcagtttcagataattaaggactagccattagttcctgtacctattgtgtaatctcttttgtctcatcaggcttgtgaattttgcagtgcttgccaatctacagttagcttaattaaaatcaatggagttgaaagttggtgtgttctctttctctttctctaaagtattccattttccaaaacaccataagcaaataaattggcatgtggaactttctgcagccatataatagtcaaacacacttaaccgtgtaaatttagctaccagcaaaattgtctaattttgcatttgctagctagccagtaaactccaggtttcttgcatcagagggggatgctaacccacagattttacagttcagaagtattattagtaaataccctcaacaaaaggctcagaaagtgaaatcagttccaatgctatcatctttcctcaagctgagctacggtgttcaattctccaaatttgaggtagctggcaaagacgttgctgttgttttctggatttaagctgggaagatagtaactggagcctaggagaagaattttcaactaatcaaatggtgttaatataagactttcaaaaatactaatcacaacatttctgtaatttgcaactggcatcaattgatatatctttgattttctctataaaaacaaagattgaactggccagattagcaactcagagttatgctgatcttccaggctggaggcctcgcccaagataacatcatgaacattttatacctcctacagaataacagtacacttgcaatctgccagactctatgactgaaatgcagaaacaataaaacaatcattagtaactctgattttgccacacgcctgggcagctcaaatttcttgacggttatgaccctaaacatctgcttgaactaatatatactttgttatgcatatctatttaaaacatatttcaataaacatgcatagtgaaatatattactgtctgtagtaaaagggaaatcccaatatattaatgatgtaatgaactgtaaaaataatcaatattggtttttctgcatgttgaccaatatatgaacctatgttttatcttcattctcatttttcagaataaaaagcaacatctatttagtacatgcaaataacttgtgggagttttcaagaatatacaaatcaaattaatttagaagcatatcagacaccctacctatgcaaatggtattatttcgttaatctagttctaaactatatgtttaacatcattatacttcaggattattttgaatccttttatttatcaataatagaactttctaagattttaaatataaaatacaaagctaccatcttgaagttgtatttcctttattacatgataattagttgcataattaaaacatgtggggtcaaaggtcagatattacaatccaagggatatcacaaaggatattgtattttttgccccaaatacgtatattaacagcaatggctgttacacagaacattaaactaaaagagtcaaatggaaactggaataacatttgttgcaaataataggtatagtgaaatttcaagatgattctgaaaatattttatttatctgaacttatgataacatatctgagtgaataactgagagtgcattcaaggaagtaaatagctctattaaaacagtaacctgatgatgaagactcaacatatgaagacagtgatatccgtggatgcctttcagacactgtgttattctttggtggtgactccattattctttatgaataatacaattagtgcaattttgagtctttccatccttgccaattatcctaacactggaaaattttctgtttaacacaaaaatactaagaactcatttgagagtatcttcactgagtggtttatcaagcactggaatagctccagaattaggagttaaatacttcccaagagaattcagtccactctaatatcacttcggtgttagaaaaaatacccttgcactgacttgaaaattatatccatagatcttttatccatgacacctggggtcacaaagaaaaaatatttttcttattcttaattgatatacaaatagaagtgtgctcaaaatagtagcaacaatgtatttcattacatatgcttttatatataatatatataaaaatttcatatatattacatatatacattttattacacatgtgattatgtaataaaatatattgatgctactattatgttattttatgagtgcttatatataagcacttatatatgcttatatattagtgaatgatagcaatgataaaagtgacaaggagggaagaattatgattattttattattttaaggtactcacacactacctgtgaagtggtataatgttgtttgaacgtggattttaattagttataaatgtatcttggaaactccagtgcaaccactgagaaatgtaaaaaagaagcataactgatatgctaataataagggagagaaaatggaatcatacaaaatgctcaattaaagccatgaaaggcagtaaaatagtggaagacaaactaagaacaaagaaaaagggaaacaaatataaaactaacaaatatgataggtattaattcaactaaatcattagttactttaaacatcaatgttctaaatatatcagttaaaaggcaaagattgtaaaaatggatttaaaaaaaaccttcccaattgtatgttgcctacaagaaacatgcattaactataagagcacatactgaaagatatactatgctgatgctaatttttaaaatgggaacagctatattaattttaaacagactagacttcagagcaaagaaagttaccagggctaaagatgggtattacataatgataaggggtcagttccttataaagacatgacaatccttaatgtatagatgcctaacaatggagcatcaaaaaacatgaggcaacatctaatagaactgcaaggagaaaaacatgagtccactattatagttggtgacttcaacacccctctatcaaaaatggacatatcaagcagacagaaaaaagagtaaacacagcaccgtcaattaactggatataattgacatctactgactgtcttatgattaaagaacacactattaaagaacacgtggatgaaagaagaaatcttaacaacaacaaaataagtattttgaactaaatgaaaatgaaaatacaacttacaaagtttgtgggatgtgtcgaaagcagtgcttagagagaaatttatagcattgaatacatgtattagaaaagaaatatttaaaattaatcaccttatctataacaaactcacagccaacattatacttaatggggaaaagttgaaagcattccccgtgagaactggaataagacaaagatgcccactttcaccacttgtattcaacatagtactggaagtcctagccagagcaatcagacaaaagaaaaataaagggcatccaaatcagtaaaaaggaagtcaaagtgttcttgtttgctgataatatgatcttatacctagaaaaccttaaagactcatccaaaatgcttctaaaactggtaaatgaattcagtaaagtttcaggatacaaaattaatgtatgcaaatcagtagcgctgatatacaccaacagcaaccaagctgagaatcaaatcaagaactcaacctctttaacaatagctgcaaaatgccacaaaaatataacaacaaaaaaaattagtaatatacttaaccaagaaggtgatagacctctataaggaaaactgcaaaacactgctgacagaaatcatagacaacacaaacaaatggaaatacataccacgctcatggatgggtagaatcaatattgtgaaaatgaccatactgccaaaagcaatcatcaaatttaatgcaattcccatcaaaataccaccatcattcttcacagaattagaaaaaacaatcctaaaattcatatggaaccaaaaaaaacccacagggccaaagcaagactaaggaaaaagaacaaatctggagacattacattacctaatttcaaactatactatcaggccatagtcaccaaaacggcatggtactggtataaaaacaggcatatagaccaatggaacagaatagagaacccagaaataaacccaaatacttatagtcaactgatctttgacaaagcaaacaaaaacataaaatagggaaaggaaccctattcaacaaatggttgccgggataattggcaagccacatgtagaagaatgaaactgaatcctcacctctcaccttataaaaaaatcaaattaagatggatcaaagatttaaatctaagacttgaaaccataaaaattctagaagataacattggaaaaacccttctagacactgacttaagaaaacacttcatgaccaagaacccaaaagcaaacacaacaaaaacaaagatgaatagatgggaattgattaaactaaaaagcttctgcacagcagaagaaatgatcagcagagtaaacaggcaacccacagagtgggagaaaatattcacaacctgtgcaacagtcaaaggactaatattcagaatctacaaggaactcaagcaaatcagcaagaaaaaaaccaaacgattgcatcaaaaagtgggctaaggacatgaatagataattctcaaaagaagatatacaaatggtcaacaaacacatgaaaaatgctccacatcaccgattatcagggaaatgcaaatcagaatcacaatgcgataccacctcacttctgcaagaattgtcattatcaaaaaatcaaaaaaatagatattggcatggatctgatgaaaagggaacacttttacactgttagtggggatgtaaactagtacaaccactatgggaaaccgtgtggagattccttaaagaattgaaagtagatctatcatttgattcagcaatcctactcctgggtaactacccataggtaaataagtcattattcaaaaaagatacttgtacacacatgtttatagcagcacaattcacaattgcaaacatatggaaccagcccaaatgccatcaatcaacagtggataaagaaaatgtgatatagatatatgtgtgtatatatataaaatatatatatatatatatacaatgaaatactactcagccatacaaaggaacaaaataatgacatttgagcaaccttggaattggataccattattctaagtgaagcaactcaggaatggaaaaccaaacatcatatgttctcactcataagtgggagctaagctatgatgatgcaaaggcataagaatgatataatagactttggggattttgggggaaagggtgggaggaggttgagggataaaacactacatagatattgggtacagtgtacgctgcttgggtgatcagttcaccaaaatctcagaaattgccaataaagaatttattcatgtagccaaacaccacctgtttcccaaaaacttattaaaattaaaaaaaattaatcaccttagaaaagtagaacaaaagcaaattaaatccaaagtaagcataggaaaataaattaaaattagagtagaaataaatgaaataaaaatgggaaatcaatagagaaatcaacaaaaccagaagatgattttttgaaaagttcaattaaaaaaaagcctctggccaggttaactacgaaatcagatattcaacattattcacacaaactaaaataacttaaaatggtatatttaaaatataactgtggtgtacaaaggaattgcagtatacaaatatattgcaggtaaaaatcacaatatttaaaatatttaccaaagcctacttgactgtgtacacactgcctcacttcagcaagttttttaaaataatgactatactaaattaactgcttgaattcaaacctattctttttctttaggtgaaatttttaattcaaatttctgaaatccaataatgtcacctaggccaataatagatcaatcatggtgcctgtcaggttctttctgagccctgttagcagctcatttaagtgtcatccattaatacacactgccttgacacctccaatgtattttttgttagattagttttcccatgcattgggtccattatcaatccttaataatgagaaaaacatgaaatttaaaatttaaaattatctttcaaacattggaagaggaaaggatggttttaattccccaggtcgttaaatgagtaatgaagcaagttttacattctaaccgtgagacatattagctgttaatttgaaaaggaaacatttagtttccagtctttggggacctcactgcaaacttttatttacaaagctagttgcacgtgtctattattgtgcatcgtttttgagcttttgcattatattttgcatcaccacagttaagggtaaaataacaggactatggcatctgtgtttagatttagatagacaaatggggaaatagtgcagagaaaagccaactaaagaaattttaattgttccttgtataaagccccagtttacagaaaggttgaaccaattcatttctgcagcttacatatctaaatctgtgaccatgtagcatatgaaacaaatagggtatccctattaatcactgagttgtcaatatgaacataaagattggtgtgaattcagtgtcctgcacaaaagtcttcagttaaaacagaagagatattatggtggtggattccccaggatgttcaacaaacagagaagaggccaaagcatgttgtctcaatctttcttcttgttttagtccattctcacactgctaaacgatactacccaagaatggataatttacaaagaaaagaggtttaattgactcacagttccacatggctggggaggcctcaggaaacttacaatcatggcagaaggagaaagcaagcacatcttacatggtggcaggtgagggaacatgagcaaaagcagggaaaactgccttataaagccatcagatctcatgacaattcactcactatcacgagaacagcataggggaaaccacctctacgatccaatcgtctcccatcagattcctccatccacacgtgaggattaccggtattacaattcaagaggaggtttgggtggggacacagccaaaaagtaacactttttatttattacaattttatatcatccctagcaaattgttccaaattcttgcccatcctccatcaatatctaaaattgcacttgtaattgagaatacttgctaaggttttacttgtacttgcatatagaatggactcaagatatgaacgctgtttgtcacgattttataaatgaagacaaaacaggtattaaatattcaccctgttttctggatgctcagtttcataataaatgcctgccttggttcatgcatcagtactgtttccacttggcttccttggacatcactttctcttaacttttctcctacctctctggcccttttctcttgaacactcttgagaatcctaccttatctccctgccctcttaaaatgtaagtgcctcaagctcttggtatttctcttccccatttgtgctttagtaactcagtattttctagaggctggcagcatccacatatatctccagataagacctctgctaaaaagctagactcatacatatttacccctttgctttctccatttggatgttgaataaccatgtagaaaataacaagtccaaaactcaggtcctgatttttcaccttcgaatcagcatctctcatatttttccaactcagtaaatgacagctacattctgccacatgctaaaaactcttggagacatcttcattcaaccctttgtcttgtattctacatctagtttatcaggtaaagcagttacctgtaccttcaaaatacagttaaacaaaatcctaccctttttcttggtcctccctgctatgattctggtccaacccactaaactcttttgtctggattattaaaatagtctccctgattcctttttgccacccacaaagccagagaaattctgttaaaacacaagattaatgctgcataattccttttctcaaaatactttaaagagtgctgatttcagttacctggatatgtgtaagacacaattccaaaacagactggcttaaaaaaaatatgtatcactccgctcaaggtcctgggaaccaactagactcagctgggttgttttggtttgggatctgtcatgtgattgtagtcagatggaggttgaggctgaggtcatctttatgccttccacaatcacaggttttcatgacacaactacgtgaaggctggaacagctgggatttatctggcatttcctgtcctatttgtgagatttttcaatgtggtttctccaattcagtggcctcaaggtagccatattacttacatggtagttggttttctctagagggaggatacaaagaaaacggtggaagttgtatgcttttttattaactagccttagaggtcgcatagcatcatttctaccatagtacatgtgtagaagaagtcataagtccagccaaaatgaagtcaagatgtagagacacctctcaatgggaagaaatctaaagaatatgccacagttttttaaaactaccctacacttcatctcaattaaagcaaaagccaaaattttctcaatggtctgcagtgggaaattgtagcaaatttgaccactgcttgctttttaaaatcaagttggattagaacagtcacatgtattggtttacatacaatgatggctatgtattataatgccaaagttgagtagttgtgacagagataatgtggcctgcaaagctgaacctgtttataatctggccccttagaaggcaagtttactaacccctggtctgcagttttgaacacacacaccctgctcccctatttgctctctgaattcatctctctaatactctgttcctcactgtatagtttagcatatgtgccaccttgctgttccctctgcctagcatgcttttccttcagatatccagctggctcatttctgcatctctttcatgcatttgctcaaatttcatcttttcagtgagtctttttctgaatgctcaatttaaaagttacccctatttcccaaaactccttctctgccttctctgagtgatttccccccacttataatattttcatatgctattgatttaacttatttattttatttatagtctattttcctcattaaaatgcaagctccattacatcagggattgttgtttgttttgttctctaatgcatcccagagcctacaacagtgctgacatgtaataggtcctcaataaacatttgttgaagggacagaggcatgcatgcagtgactaatgaaataacacaaaataaatatgtaaaattcataggcaatattataaaatgaaatgtattggctgtttggggttatgtaagtggaacatagaagtgaattaaagctttaagtaagagggaagatcctgatgttagtattgattcccttttccccacgatgaatgatgttttgaagatcttgatgctaacattagtttaagctcattcaatactgtcataggagagagaaaatcatttgagatctttgatattaatattccaatccctcacctctgtctgtttgaactcatcaatcactttgggaataaaactggaatagtgtacaaattcatgttgaggtgaggtgttttaatatagaagatattttcttctttcccttgatgtctcagaataaaatgatgaaaccagaaggagagagaaactttgatttttgtatttcaaatttctattatttattatttaagagtatatgatttggagtcagggtaaaattgagtcctcacctcaactctgtaatttcacagctatttgttcttagaaaaattcctcaatgtttcagatcctcaagttctttctcgttgagaaaatgaagacggtaatatccatctcatgcaattttaggaaaattaaataaagttagatattttgaaaaatgtaccaaatttagaatagtacctggtacatatcttctcagtaatgataaacagaatattttcccacatctattttcaatagtaatgaccataatagacagaaatttttcatttacttgcaatgaccttaaaaaactaaattcaacataatgccacctctagaaagaagtccattaatagtggacaaatgtctactaaatataacttacataaaaagaagtaagagataataaaacaaatggggtgaaacaccaagacagttaaaagtatttgtctttgtgacttgcccatttgagcagaaattcttttctggatgtcagaatgtaaggaaagtttagatgaaaaatttcagtggttcagttagttatagattcagagtttttgtttatttgttttgtgctcagttggttcttgtgtttgtagacatcactcacattacaaaaataataacagagagaaaagactatgttcttcaaaacaaaaagctactcagtagtgactggcacagaaaccaaatctcatggattatttaaattcaatcaaatgttgtttattgatatcacttatgtgtcagatattatgggaagcattgaagataaaatagtacataaaatacacttctgtctttcttaaagttcaatgatttgttgcctaactttgagaaatactacccttcaccacagaataacaattcacatcagcataactaggtcttggagaagtactgcaataaagaaactgtgtaacttccttatcactgagtgtctcaaacttatttgaggagagtgcttctttgtgtaacatccacaactaatatgctaacacattcatgtccaatttcatcatatcctatctccactgattagagatccttcaagtaaccctgaggttatgtgctttacgtatttggcttctgactaagcattgatttagagatcagttttctcagcaaaactgactttgaaaaccacaagcaagaactataacctttgatcttcacaggcgtatgtgagggaaacaaatgactggcatgaggttgtgcagctggtgaatttgaaactcaaccatatgagtaaaaacaatttgagtaagacacaatgaatttagacttcatttattctcattttgaaataatttgcaaaagtgttaggctaaggatttatattttcattacctatgaggaaataaagcaagcaaatttggaccaaaactacaaaaactaaagaattcaaagtatcatcaagtgctttaaaagtcacattttcagtattctcatcatcacacaaacacttaaattgaaatgacaaattattcagtatggctggtcagaaaagagatttgactcagagacatctgttactagttgttatctgttattataggaattgccataatgagacaagctcactcatcatggatttctattggtaagaagaaaaataagggatttttgtgagaagacaatgctgtccttttaatgttagcatcaaaaggtccaggatgaaacttaattatttttatattttcatacaaccatttagagagttatcatgaatgagctgccttttgaggagggatcccattttataatctgttagcttcttttcccaagaaattgattgacctaagtgccatactattttgatatgatcaatttggattggaaatttttagaaacatgttatttctaatttcttgctcctttctcaggtagaagcagaatagtagctcacttgcataatgcttggcacatgatttgtgctcaataatggagagttgccattaccattattaataaaaatgcatataaaacatataataatatattgttattatacacaaagagcatactagataccatgcctctggatagaagtagtacttctttcttagcatccaaatttgtacattgtacctttttttgccttattacctataatactttttaaattttgtgtgtttacttttctgtctcacagaatataataagcattccttgtggataaaaatgttatcttttatctctgtatccttaactatattctacaaatgtttgctgtaagaattaacaaaaacaaataaataaattgttaaactacatttgtttttttttaaaagatagcatctgtgtgaagaacctactgaattcaatatgcatagtgtttaaatgatgttgcaacatggccagcttggagtcctcatagcgtgtcgagttctgaatattcacacatcttacagggcatctagttttccccagagcaagcactccaagcaataggaaatgggagcagactctgcttaaaatgtaaactttcagctgtcaccatgtcatttctaccacattttactgatgaagcagtcacagagctaacccaggttcaaagagagaagcaataaaccccatcttttatgcagaaagtgagaaagacattgcagtcatcattaattacccacagaccatttaatctatatcctcattaatgacattttctcagcttgacatactcttggctttgacaattaacaaaaacagaagaaatagaagaaaaaaaccaatatggtatgcagtactcataattacattttcatttgtgttgctatccttgattactatacatataagaaattatctctcaaggaaataaatcatccttgtattgcttctggagatgaaaatcaatgagtttaccttttgctacaaatatagccactcttttttttttcttgtagacattaaacaccaatttttggagacagttttgcatatacaaaggaatctgagcagcatacctgactcaatattaataaatgaagttgaaataggacctgtgattggtctgtgatgacagaaagcaaatagcttttcctcctgatacaactaaaagattactttgctaagcatttatttcaaagattggcaaagaatgtgttataacacaggtctgtaggcataatggaagaaatgccttgagcgtcattcaaaggaaggatagagaaaaaatatatatagaatcaatgtattttaacagtaacagtcttttaatatttattaaaaataaaatattttaattttaaaaaatcaatcttttaattttttattaaaatagaaattataagtcaaaagtagtgatggacacattatttagcagaaaattcttcagagaccacaggaaaatccaggttgttggagggttaatgagaagtaagaaaggacgcagcagtgaatacatcaatttaaccgtaggaaaaaaaatgtttactgctgatgaattaacttggaggccctctatctagaagaggggcattttttccttgcttaataaaagggagtttataaaacttatagcatcattgtaattgagaaatgtattttgaaaaatggaacagaataataggtttttcatagattagaataaaccacagtgtttaaatattacatgtgtttatgtagttttaaagacaaggaaaaagtgcatagcaaaattaaagttgacatagaaactatactttacagatcaaactttgaccaactagaatagaagggcaaggagagtctgcaatgagttgattagctctgctgcgggaaattgaccaactgcaagtgaactactgggggtatcgacgttttatgtggatctttgtgaagcacaaaacaagatcagcaaatcataaagaaacaaataatgaaagctgacttagttggttcaggctgctataacacattactgggtggcttaaacaacagaaatgtatttcttacagttctggaggctgaaattctgaaagcagggtgtcagcatggttaggttctgatgatcaccttcttccatggcttcctcacatggtggaaaaagataaagaggaagcacactctatcctgtgtcttcttataagggcactaataccactaatgagtgctccactctcatgacctaattacctgtaaaggatctacctccaaatgacatcacattgggaatcaggctttaacatataaatgttgggggcatacaagcattcagttcataatgaaagcaaaagaaacattgaaagaaatcagcattttcttattcttctatcgcttagcctaaaaggtaggcttgattttaaataccagaaagcaaccaactatttatacttcaaagttatttatagtttcaggtacgtgtgtagtcatgcatcacttaatgacagggaaatgttctgagaaatgagtccttaggtgatttgttgtgtgaacatcatagaatgtacttatgctctatgtatacctgcatgatatagcctactacacacctaggctatgtggtatagagcctattgctcttcgcttttaagcctgtatagcttgtgattgttccaaatgctgcagacaattgtaacacaacggtaagtgtttatgtatataaacatgtcaaaataaaaaatgtacagcaataatatgatattacatccttatggaaccaccatggtatatgcagaccattattgaactaaattattatataatgaatgactgtatgcatatttatgtattaacacactagctatgcgtttgtacagattggcattaagtaaattttgtatgcttttttctggggtttggcaaactatggacctcaaattaaatcaaacccacctccatatacacagctaaagttttattggaacaaaaccacattcattcgttgatgtactgtctggttacttttatgttacaatggcagagttaagtggttatggcagagaacataatgtcctcaaagcccaaaacatagactatctggccctttacagaaagagttgatcaacttttggtttattccatagagcaaatatgggactctcaacaaatcccaattagcacctataactacaatgatagtaataattacagtagtagtaataattgttatcagttattaaatgcatactttgtgccaaaattagactaagctgaaagagcagggtcctatgatttatagcctcatccaaatcacatgaaatgaggaaagaatagttagaaaatagaatgcctgtcattcagaagaaaaagagatcaatatctaccatactattaataaatacaaatgttagcctgtcatgacttgttctaatgaatgcctaacctcattcaatatatgaaattaaattggataaagtctcattaatacaagaagtgattagtattttttcagaggcaagcatttgttgataatatgctaaacttagtttgattctaggaggggagcctctatgttgtatttcctattctttgtaacaatgaaataaataaacaaaactctatttcaaatcaatagtaatgccaaatcaaactgcgtagtctccagattgggatgcatacaaaaatgatctgctgtggtagaaataatttattaaaaattctgtttacatttatcttatctcatcaattttagtaggtatttttaaattatatattagaaaaattgtgtacatataaataaacaaatatagtactgaagtttacttgctcaaatattattacttatagagatgtgcatccaaaaatgtttagaaactactgacaaactataagtaaataacctgtcaaagagttctcagaatccctctaagattgtaactgagtatgcctgtagcataatccttattaattttgctagaaaactcagttatgttcaaatataaataaatatacttatgtttaaatacagatacatcaataaatgcaatgactgtcatttcattccttcgtaaagcctttcattctcatctcttccttctctttgctgatcttcaaattctgaagcttctttaatgggattcctgttagcaagttctctcctttctgtgtcctccatacacaaatgtctgtggtttcttgataattatattccatgaacatattaatcatacctttgctcctaattttatatacaagttggaatccagactaagcttttttatttaaaaaaattacaatctcaaatcaataaatgcttctaccatatttttctctctttcatttaagcatattgctataattacacttactgttcttttctcactaatttatcactcttcttcttcctttctttattatccatgtaaattttaacctttctaagatagactgatttgtttttttgccgtgtagtaaatgatcctcctacttctagtcaaattctccacagcatcaatcagagtctagttgttactgaacaatggtcgcagttttgtgctgtggtgacttaccagaaagaacgatgattcctagtgaagttcatcactcccagtgcatgagataagagttacatttcagcaaatgtggacctaaaaacaaaaggtgaaccacttcatcagatgcttaataataaaattcaatgccatttgctcacagatgtactttttcagctaaactgggtctcaggatccacatgtagttcctcagcgctgtagcgcagctctgatttgtgcacatatgtgctcacgttaacaacatcatactttggaggtacttaacataaaagaggaaatagttctttagaagataaaactctcagtataggacatctgatttttaatattttcttttcttgttaagtcctaaaaccagatgatatgaggtctaagcaatattcttaaaggaaatttggacctctgctacattacatcatgctcacacatcactttaggaaaagttaaaagagttataacaaaaatattttatactttgataaacataaattttcagaactgaattataactattgcattccaaatgaattttctgtatacattactgattttaacaccaaggtcatggtcattttaatgaaaataagtaaataaataaacactagcagaaaaatatggtcagaaaaaaggagaataaaacctgcatctgaatttcagttgataatgggctatttaataactaccagtacacagctctgcagggaaaaaggcaataattcatgttaggtatatccagtacctaatgataatcaacatgctttaaggaaaatgaagataatatttctttatggaaaagaggtaaacgaacttctttacataatatgtttaaaattctctttttagtattcagattttaatgaactgcagatcactgcaattcttcatgttaaatcacatctgggatttttccttaatcaagtaaattgggttaaaatattgcatttttattcttagcttaatagcttaaagagatattaaacatttaattattaaccttgacatgaaagaattggagagatttcttagatgatttaaggatttgaaagttctctcttctgagtgaagtttatatgttaggataaagcaaatctaacgagctatcttgaaatgggcatctgactaattgaaagagactaataatatagcatacatatatatccaatgttacttaaggaaatcattcatagaagaatagatgttttattttaaaaatcaactaatggatgttaaatattaataaactcatcataactgaataacagataggttagcctagtaatttactcattcaaaaaatatttactgtacattcatgatgtggaaagcagtattctaggcactagcaagagagcagggaattggttcttatcaaacttatattctactagaaatagatgcatatgaatagagttttcagaagagaaattaaaggttgcaagaaatataaagaatataaagagtcacatattaataggcaatataggcaatggtatgctgacaaatgtttaataaccagctctctaaaaggaacaaagcaagccgagtttttgccattttctgtgatgaaaacattcccaacatgactaatttaaatttactaatatgacatcactcaatacatagttggaaagaggtataccgtaagcactagtgagctgttataagacagcattggcacacacactatgacaagattactttaagttggatactcagaaaaggcctctctgggaaagtgacacttaaactaagatctgaaaaaccagaaaaatgtcgtgtgtgaaatcttgaggcattacaccctgaagagggataacagctaaagtttccaaaccagtgcaagcctggattgttggaagaacaagaaggccaataagtctggggtgtactacataaaaggaggatatacaatgagattagataaacagtcaaagcttttcatgcagaacttcataacatagggtatgaaatttggcaaagatgtcactggaaggtttgtgaatcatgttaattgtattgattaaaacttttgcatttactctatgctgtctatagtaaagcaaaaagctattacagaaggaggaacagaccttggcttactgatgataaaaagaataggaaaaaatccttaaaaactaggttgaataagaggttagaattagtaggcatctcaacatattattacaattatggcatccaacttaatacataatttgctttgcttcatacaaatatatttttctgcttttgttttctatgttcaattaccactgtctgtcatgttgtactattatcacttttagaaagtgattctatcatacaaaaccaacataatctaaaaagactccctgagatcatgacccaagagcttatatataaaacaaatgtttttaaaactgtgcctataatagcacacaacagcaagtattagattccacaaacataatatttgggaaataaaatgttatggactccaagagaactgtatatatttctaactctattcaaaaatgtcctgtaactctagatagaatttccctgggctatagaaaagcacagatggtattagtgtttattagatccatgaagcttgctttaaaaaatatatttgaaacactgatgttctgctaatatggcaagaatatggagatcagaaacaacaatgcaaagtagacattccttgtgggtggaagaaaataaaaatatttacattaaccaagtctaagtgcaacagctcaattaatacaaaacattaatttattttgggcttgttgcaaaattagttttagattgagcttttaaagtaattaggctaatattgtctcctctgagaggaacctggaacagtgctataccatctgtccagttcattgtctaaagaaagaaactgatgcataaacagaaaaaaaaaacaatggattgtgataatttctcaaaaaaatgtatgatgaagtgttacagcagcagagtaggagcagcacttgagatttgagaagatcctcaaagaagagtttagcccatgtattgaaagataagtgggaatttgtcaatgagaggtgaaagaaggcattctgtgcatatctgtgatttcccaatggctaagatatgaactacttgcaagaatgaagaagagtgatgattagagagtttaaaaacaacttggattcatattatatgtcttggtaaaaaattgatttttatctctcttggtcttgggaatcagtagaagcctttatttttttcccttgaataagattttattttgaaatagtttaagataaacaagtttttaaaatagtacagaggttcccaaagaaacttgtaagcaaagaagttcatccaaaccaaaaaactgatataggtatgctattaactagactacagatcatactgtgatttcatctacttttcagtcatcttttcttcccttagtatatagttctataaattccatgacatatatagattagtgtatcactacaatcaagatagagtactgttctatcaacataaagaaatttatcttttaatagtcacaaccctccacttcctcataccataacccctaataaccactgatctgttctccatcactacatttcatcatatttaggcttttaaataaatagaatcacacagtaagtaaccttttgagataggcttttttcccacttagcctcaatatatattcaagttattgtgtctattaatagcttattctttttcatttctgagtagtattctgttgtaatgatgtaccacagtttgtttattcattcattcattgaacgacaattgagtttttccagattagggctattacaaataaagttcctatgcattttagtgttctggtttttcgtgaatgtaagtttccatttctctgagataaacactaaagattgtgatttctatgtcatgtgataaagatatggttaactttataaaagactgccaaactgtttttcagaataaatgtatcgatttacattcccaccaccaatgcaggagagatccagttgttccacatatttaccagcacttgatattgtcagcatggttttacttttcccattctagtaagtgtatagtggcatgttattgtagctttactttgcttttctctaatagctaatgatattgcatcaaaaaccttttaaacctttaaaaatgatattatgatataatgggtaggtaactttgggaactatgtagagaatttaatgagatgtccaggaatgaaagactaaggaacaactgagagtagggacacaagtcaggatgttcagctataggccagagaatagataaagtttgcctgaagtaaagtattgacaaaaggcaaggagacgagaggagaggttggatttgagaagcatttggaagtcaattcaaaaggatttaatgaacagtttattgtgggaatgaaaaaaggaagttgtccatgtcaattcttaggttttaagcttcaaaaaagtatgtagataatggctatagtaatcaaaattaagaataatagagggaaatagtttgaagagaggaaatgatagatatttttggccatattaaaactgaggtatctacaggacataccaaaatatctaactcagtaggaaaaatattattcagaaaggacatttggtttatgaagaataaagacctattggattaagtggaatgttttacttaaaagtagtttcctactcttttcaggaatattattggcaattaatcattgacgtctaagccagttcacattaaaaataagaccacaccaaaagacattttagattgagaaactaatgtgaacaattcatggggagaaaattgaaatatggcaatagtctattgtacagctgtcttgaaggggaatttgaaggccataactgtcgaaggattttcctaacttaacagaagcctgtgtacactaccagaagaactgtgtactttttcatgatcagagaaatcattcaggacaacgcagttagcaaaccataactcaaaatcgatagacccccaccccccgcatttttgttatttcatgataagataatggcaatatataaaataagcataatactaatagtatataaaccataaagtaaaatgtttaacatatattattttattcaaccctaaacatactctattataacttggtgagaaaagtagtaatatctccatgttaaatattaaagaaccttaaaactagaataaatgcaaagaacatgacacatggtatggatgacctttttttctgaaaatagtttaaattcctttcccctataccagtattagactgagaaatggagtcactcctgagaaccatctaagtactggtatatctgcttgaatcacaaacacatgattataaggcaaatgtaatccatatttatgttgttaaaaaagatgaaaatccataaaatactgtgatcatatttagagaattttcaatcaaatgattctgtcaatccctaaatatgctgatagcaacaaagaaacagatgtttggttttattccattgccagtgatataggaaaaaaaaagctattaataagcataaattctactaaagttgaaagacatggaatattcatataaatggagtacattttaccactttttatactcaagaaaataacatgaaaaataacggtacagggtactaggcttaatacccggatagtgaaataatctgtacaacaaactcccatgacacaagtttacctctgcaatgaacctgcacatgcaccccaaacttaaaataaaaattaaaaaagaaaaaaatagttatatagtaaagaaaaagtagtaagtgtcagtgggagacttcaaaattacgaacaaagtaaaagaggaacgagggtggggtgtcagatctaaataaaagaaatacaaaaaataataaagaaacaacaaaatttgccgaaaatatccatactagagaaactacttttttaataatcatgaaaaaagcacgattatataaataaaagaaaaaagcaatgactactaaaatagaatataaaacaataaagaaaacctgtagtaaactaagaaattgttgagaaaaatattattggtattttcaaaaggcaaaattgaagtggcagtattaaaaaagggttgttgcacattgtgtatatttaaaaggcaaattagaaaaatggcttaattacctatgtagcttattcctgcagaagaaacatacctcaaaaatagaatgagtcaactcatggttaatcaacacatcaggagaaacaggacattccagcaatgaaagaaccatcattaaggaaacaattgaggacaaacatcctgactaatgaaaagcccaattctttgatatcacacacagctcaattcaggaatgatattccaaaaaataatcaaagtgcctttagaactattacccatgcttttactttcagaaggcattttgtagttacaaaagaaagaacagagatatttgtaattgtatctataaggatgcaaactgccctctgccctaaaatctttaatgactgtaccactgctgtaaatatatgtaaacatactttagacacatgcaagtttttttgaggttatatcaataacaggtttcatataacaaactaaaaataagcaaaaaaaaatggaaaaaaggtatgtaacatgcatttactatagttgacatgcaaacttagagtccctgctttaaaaaatcaacaatgaggctgggcgcggtggctcactcctataatcccagcactttgggaggccaaggtaggcagatcacttgaggtcagcagttcgagaccagcctggccaatatgttgaaactgcatctccactaaaaatacaaaaattagccaggtgtggtggcaggggcctgtagtcccagctactcgggaggctgaggcaggagaatcgcttgaacccgggaggcagaggttgcagtgagccgagatcacaccacacgccactacactccagcctgggcgacagagcgagactccatctccaaaaaaaaaaaaaaaacaactatgaagttcaacaattgcaaaatgtttcatcaaaagagcttatcaagagaatgaaaaagaatgtagctattagaatttataaagctataaactctatcagtatagaaaaagatatattggaagaaataaaacagtcggtacttttaatgtattcatttttttctcccaatgtatcaaatattgaataaaaacatatatgcatgaaatatggtgctataatcaaatggatactcaataaatactatcaatatattgcggcttgaggtgataaaaatatacagacaggtcagtttggaaccatgcataaaattatttatgaaaaatagaagctccatattcatttatttaacaaagatgtatagactatgtgcttaacaaaataaacactgaaagaagccatcttcatggaaatacaggattatattggaaaaaaaagtcacaatgctttctttcctgatttattaaggaaaattacaaagattttggaaagactcaataaaatatatttacttcgttaaaaaaacacaaacctatgcatactaataagtagagaacctcggttgctgcttctgttgattacagagactactgggataaggcaatcaaaactaagaaatagtttgccagtctcttggaagccagagaaaaagaaaaacaccagaaacctagccctggaatgtcattgaatagctgtaggatagtggcaaggatgtcagcatctgttaacactcgattttctcttctgcaaaaatgaaactattagtattccaccatattgcaattaatatcacttgagctaatgtatacaagcagtatgaaatcccacaggattcacatgtaaaatattggattttttatattttaatatgtaaaatgtaagttgtttcttttctctctgatacaaaatgcagttttcattccacagtttcactctcatacacttaataacttttgttaacgtaacaatacagtgtgagagttcctggggctatgcctgacccaaagcagacacttagtaaaatgtctgtggaacctaaatttattttaggatacaattggaatctaaactaaaagagttttcaaattcagaatcaggcatatttgctgcaaagcattatgggtctcatttccatttccaaatccaccaagtccatcctttcacgcatcatgttactcagggataaagcacatctaagtgaaacagaagttaaatctgctctttcataacccagagacattaattacaatggaatagcatgataaacaccgtgaacgatatggagattaatagaaaaaatatgaaaagaaaatgacagcagctaggaagaaacaaaaaggatgggtggaaataagggaggttgacctccaaagggcaagtaaagtagaactaaaataaaacctggtgattttgatctgcatgtgtaattaatatagtttctggtggggggtgatgggagaaatggggataaagaaaagccctgagtagcaaccttcttgcctgaattgtgaaggcaacacgaatacacagatcaggtcttgggaaaaataaatgtgaccccttaaaacttgcaccatattattgaaatctctttgacacgagtaaccatagaagacacaggtaacatatgggttgctctttatgtagggctttagcagtctattcagtcttttaccatgtgactactttgtatgtggaaaaattgttatataaacaaaatagaagcattttctctttgataccaagagtagagctaagaccaataaatcaatattaagggaaaattttaccttagatataagaaaataattttctaacagctcaaattatactcagttgttgttattaactaacaacccttatgatatctgcatactaatacttgtaaaatcaagattaatttgatattcatttctggtaggggatggggttatgtcattttcctacagtcttggagagaaaataatttgttaaatgcaatttgctagcatctattggaaatcttgtaaaggttatatatttttaatttcacttaatatttctgcttttatttttctacacatgaccataaatatatatcttcatgtatgcatgatgaagcatggtgagtaacagattttttaatggaataagctattatggtactttcattctatgaaatattacatagttctgaatcaaaatgagagggatagctgtataaaacctaagctattgttaacagaaaaaaagcatgtaaacaaaattattaaattatggttttaataaaatccatatatatgaatttggacacgtgtatacacaagtaaagtcagataaaatgacagaatataacgtatgttgaaatgatagcaatgactaccactaaaaaaaatcagaatagaatggtaatttaaaataaatataagacagcagtgggcaggatgaggacacatttaaatctacataatactgcattgtataagctaaatttttcaagacctgcttgtgtaattatttttaaaaagaaaacaggtttgtttccttgtgttgagaattattcaacatggaaagtgctacagaagagagctcattgactccatttgttctaaaaaaacaaacaagcaacaaaaaaccctatatattttatacaagtagaaaccctatatattttatacaagtagaaataactagcaatatatttctatagggagaaataagccagcatattttcaacgttcttaagatttcatttctaaagcaaataaaacaaggcaaagccaatattgtaaaaaaaattaatcctaagtctacatgaacttagctgggtaccagttgagatatttgaagtttatctaccctgtagtcctcacatttaaaatttttctcaatagttgaatgtaagttatttacttctggattgaacaataaaatgtaaatggaggtttccaggaagatgaattgagtgtgccatactgcctgcctctgtaggctccacctctgggggcagggcacagacaaacaaaaagacagcagtaacctctgcagacttaaatgtccctgtctgacagctttgaagagagcagtggtgttcccagcatgcagctggagatctgagaactggcagactgcctcctcaagtgggtccctgacccctgacccccgagcagcctaactgggaggcaccccccagtaggggcagactgacacctcacacagtgggtaatcctctgagacaaaacttccagaggaacgatcagacagcagcattcgcggttcatgaaaatccgctgttctgcagccaccgctgctggtacccaggcaaacagcgtctggagtggacctctaacaaactccaacagacctgcagctgagggtcctgtctgttagaaggaaaactaacaaacagaaaggacatccacactaaaaacccatctgtacatcaccatcatcaaagaccaaaagtagataaaaccacaaagatggggaaaaaacagcagaaaaactggaaactctaaaaagcagagcgcctctcctcctccaaaggaacgcagctcctcaccagcaacggaacaaagagaatgaccagcaacggaacggagaatgacttcaacgagtcgagagaagaaggcttcagatgatcagactactccaacctacaggaggaaatccaaaccaaaggcaaagaagttgaaaactttgaaaaaaatttagacgaatgtataactagaataaccaatacagagaagtgctttaaaggagctgatggagctgaaagccaaggctcaagaactacatgaagaatgcagaagcctcaggagccaatgcgatcaactggaagaaagggtatcagtgatggaagatgaaatgaatgaaatgaagcgagaagggaagtttagagaaaaaagaataaaaagaaacaaacaaagcctccaagaaatatgggactatgtgaaaagaccaaatctacatctgattggtgtacctgaaagtgacggggagaatggaacaaagttggaaaacactctgcagggtagtatccaggagaacttccccaatctagcaaggcaggccaacattcagattcaggaaatacagagaacgccacaaagatactcctcgagaagagcaactccaagacacgtaattgtcagattcaccaaagttgaaatgaaggaaaaaatgttaagggcagccagagagaaaggtcaggttacccacaaagggaagcccatcagactaacagcggatctctcggcagaaactctacaagccagaagagagtgggggccaatatttaacattcttaaagaaaaaaattttcaacccagaatttcatatccagcctaactaagcttcataagtgaaggagaaataaaatcctttacagacaagcaaatgctgagagattttgtcaccaccaggcctgccctaaaagtgctcctgaaggaagcactaaacatggaaaggaacaaccggtaccagccactgcaaaatcatgccaaattgtaaagaccatcgaggctaggaagaaactgcatcaactaacgagcaaaataaccagctaacatcatcatgacaggatcaacttcacacataacaatattaactttaaatgtaaatggactaaatgctccaactaaaagacacagactggcaaattggataaagagtgaagacccatcagtgtgctgtattcaggaaactcatctcacatgcagagacacacataggctcaaaataaaaggatggaggaagatctaccaagcaaatggaaaacaaaaaaaaggcagggtttgcaatcctagtctctgataaaacagactttaaaccaacaaagatcaaaagagacaaagaaggccattacataatggtaaagggatcaattcagcaagaagagctaattatcctaaatatatatgcaccgaatacaggagcacccagattcataaagcaagtcctgagtgacctacaaagagacttagactcccacacaataataatgggagactttaacaccccactgtcaacattagacagatcaacgagacaggaagttaacaaggatacccaggaattgaactcagctctgcaccaagtggaactaatagacatctgcagaactctccaccccaaatcaacagaatatacatttttttagcactgcaccacacttattccaaaattgaacacatagttggaagtaaagctctcctcagcaattgtctatgtttttatgtagtctgtaatactttcctcttatagaccaaacttcaggttttttaggaaaagttggagctctgtgcattatgccccaccagcttcaggttccattgtcaacctaccccatacgtataaaccatctgttcgtcatgttttggctttatccaaacatcttcacaaagaggccatctgttcccttcttttagatatctatttatggcactttctctcttatctattttacaacatttttgcatatgtcaaaaattcaattactagtcacatattagtatgtcgtctactcaggaggagtcttagtgatccaaagtgcatggatagtaccgagagactgatagatctatctaaaatgaagggtatggacattgccataaaagcctcacaatgcatgaaatggataatagatgtgagattccctggggagctgtgtgcacgtgacttccaaaacgctgtcatttcactatgtagaaggacaatatgaatttacatggaaatttatttccaccatcagtaatatattcctattgcaaatgtacattttagagaaagtatattttcagttgaagtgaaaaaaaaagagatgcacaaatagatgtttgaatggcatttgtataattctgggtcaagtttttaggacaagcttaccaaagaaatttttaaggttaaataaaaagcaaattttagtgtatcagggtgtttgctaaaagcagagcactgtgacaaacataaaaagcagaaacattaaaagcagaaaactctttattttctctgcttccctgggagaaaaacaccaacagaagaattcggtagataaatgatgtttccaactgtgttgggaacttggagttgtgagataacaattgggaccacagattcagacaccatcatcaccaactatttttgttcacatttaaaaataaaaagtcaaaagaaatttactaaaatctgtatatgtctggttacatatttatatggttaaaatttaatatatataattttatataactgcattatctatcaatgtatctatacatctgtaacttttatctacaaatatgtttccaagttctatggataatagatgagcaaatcaattacatatgaaggttatctaataaacattatcaaatttatttagacatcaacacttgtaggaagattttggtataataaaatagacagatagatagatagatagatagataaggtagataggctagatagttcaacacaaaatgttaacataaaatatgacaaaggcactggaatagaaataaagcaaatatgttaaacataaccgtagctttgagaaagcataaagcaagcctgaataaaaacttctactattccagatgaagagataattttatgaaacataaaaggatatgtttattgcttggaaaggattgtagtttttcttagcattcatgtctaagtgaaatttcttacacagatgtacacagaaaagcaatattattttctccaataagaacacagactagtgactcttgattgatcatccacagtgcattacactcagccattttacaaatgggctctcaaattttgacattagggaagtaagtcaatttgagccaagagtttcaataaagctatgcacgaacatgaatcttgatataggttaagattctggatctagagcagcctttgacctccatctgcctagaacagacataattttcttttcattcatttttggtgaaaaatataggctggtgtgattatttctgtgatgtaattcaataactaaaatgtacactcttgtctcaaagtcctcaacatcaccttgtcctaaactcctggtccaagaccaatctaccctccatcctcttgttgcctggatcccttttctttgtgggtatgaccattggagcactgaaaagatgatataagtgtcaggtgaattccatgttatacatttgatttatgagggaatgcaggctgctttgggaatttcctctggcaccttagccctttttctcctttccttttctccatattccaggaccatctgtaaaaggcagggatgagagagagttcaatgcctttctcctccccttgataagaaggggtaggattatggataactacaactttgagaattctccctcttaccttctgtagtcctctagatgtggtccaggggattggggttttcagaagtggtgtttttgctgtgccctgtcctagaaggccctgcagaagctgactaaaatgggtaattttctgaacttagaaattggagcacttagtttactctgcttgtcagcattctcacggaagcaagaaacagtcctcaaaagcactttataactgataccatataaaaacaatttttgctacattcgacatgacatactcttacagtgatgtctctggcagaacaatgcacactcagtgagttgaggaacaagttgctgcaaagaagtgataaggcttcatgtaaaggcatgctagtgttaaagaaagatgccctatatgccagaaattgtaagaaatttgcattatgactgtatcagataatatggtcaggacagtaaagagttttttggttctcctcaaattaaaaacaactaattcaataagtatggaaatatgttttcaatattctataacttttttatactttaattccttcaagagtgtcattaaataatccagtttttttaagtatcctgcaaacaccaaaggttgacaatcaaagttttaagtcaacatgtgaagttgccattgctacttatcaaggcaataaagtcaatgactgatatattttttcagttttttaaatttattttttaattaaattttagtgtttattttagatatggggggatacatgtgcaggtttgttacataggtatattgcataatcctgagtttgggggtatggatcctgtcatccaggtagttagcataggatccaataggtagtttttcaaccctttcccacctctctctcccctcttttagtccccggtgtctattgcttccatctacatgtccatgtaaactcaatgtccagctcttattcattagtgagaacatgtggtatttgattttctgtttctgcattaattcacttaggattatggacttcagcttaatccatgttgcttaaaaggacataatttgattctttattatgactgcatagtgttccttggtacctgtatgtaccacattttctttatccaatccaccactaatggatacctaggttgagttcatgtctttgttattgtgaatagaacagtaaagaaaatataagtgcgtgtacttaactgatgtatttgtacagaccacctcttaacaactccattttgactggcctttttgtatgtcgtctgctctgatgaaacagcgtcaagacaatttaagagtatctttgcacaagttcttcccttctgaaacactcttctctctttacttttttgccctttggatctcatttgagccaagccctcctattgcacatctccttgtcattttttaattatactttctctgtgaccagactacatagactaaaaatccactctcaccacttaattacatgtgaacatgaacagactcatctagcctgactttgtcatctttttcttatttgtcaaatagagataataacagtagcttttcataaggttgttgggaagattgaatgagttaagataaagcactcaaactatataaatgtcttattgtactcagagctatgttaagtgttaggtattattacatttattatcagtattcacattttattattgttgtattggtgggcatacaggctgctttggataccctgggaatcatgttaatctttctctacctttatattctcagcatctagttcaatgccacacacacacaaacatgcttcacaaatgtctgttgacaaatcaggtaaatggcatggcttactgatgtctaactgtggagatagttatcactcatgggcccactgagagcaaaaagaaagctgacaatggtaaaataaactcagataggactcagaaggacctgtttttactgacttggttttaggatatatctacacatagagaagcgttcggacaattatagttagcaaatcaagcaacaacagtgtttcagacacttttataccaaaataattttcctcactttaaatatagcagtttttccataaaaatggcatgcatcagcaaggtaaaaaagataccatgtgtatatatcactcagacttcctgcagaaaaaagatgacactcaaatttggtaatttgaggaatgtctaaaacaagcactatttgaatagatgtgggcaggttataggaaaattgaaaaggaaggcagtaacctacagactatgcctgaaaggatggagggaaataagagtttgcaggaatctggagggaaaactgtgtggagagaacacttgacaagaaatgtgacctctggtgggcagatcagtcagcttggagagaggaagccagggaaacaagtaccttacttctctcttcctcagataccttttcctgccgtcattcctccagaagtttctcttgacagccaaacaaccaggagccagtagaaagaaaactctaagttagaactcacacacgtcagtttcatgaacacagagcagggtagggaaggctgaagagtaatttggaagagcaaaggaaagatgtcgaatgcataaagtccactaagtttgggaaacattgggttaaacaaagctacataattttcttttctgcaggatttctcagatcctttaaatgtgaatgcaaactacaactctccaggaagagggaaaaaatgtgccaagcatgccaaatgtttaaccacacaacctcccattcttgtagaacaccttaacagactcttgtcccatgtgacacactctaacattttccaatgttagtatcttgtaaatattcagggtcaacccatcataccccaagtattaaattaattttgcctgaagagttggtgtcttaattggtagaattagtatattccatttctctagcccaaattgtagaactttcagagcttcaaataattctgggcattcctctactctgatgggttcaatcggcagataaaataatgaagacattgaaaaataaagtcgcttgggcaaaaacgagagctattcctcttgcaccaaaatttagaattttaacatgagtctctagactcggtcttacaactttccaaactatcaggtttagaacacaatggagtttttaaaaccagattcagaaattaatgcacacacagttaatataggtagatggtacatcctattttctgcactgctaagatatccactaggcctatattacttccatcagaagcaaataaatttgcccttttcataacccaaaagtagaattcaagaattcattgccctcaaaattggttcacccaacttgatttttttctgtaaaactgggttctaaataaagttctcagtatataaatgaacacagagtgttgtgcaagtgggcttgcccttggtaacagacacagctgtgcctatcaaacacaaaatatggtatttaattttggaaaattgctaacagcaggcagaactgtacaaaggaaagtcaccttcaactgtcacctaggaagaaacaaagatatcaggaacagtaccatttttccaaatgtttccaggctacagttgcattcggtgcctttccagaacaactgaacaatgaaatggatagtaatctgccaaatgcatacagctgtatgcctgttttcctggggtttatattagggcctggggaaacaaagttaaggaagtaaggctgcagggtagcatcagtccatccactatagtccgattcagattcagatggtcagattggactctaaagtggaattcctagtataatacagtcttcacttccttacaatatggttcctggttttttatcctttacgttggcactgttcaagcagcacattttgccaccatgcaattatcttttggcaaccctgggcagttgttgtttgtggagagtgtgtggtggcattgaacacctacatgcttatatatacaggtggctgaagttaaccaattattcagaggcagttagatgaatcatgcatttaaggacttgtctgattcacatctctacctcatatgtagaggattcttttctccccagtaaaattttatggagatttactatggagggcagatgtgctggttctagcacgacgtggtggactggaatggaatcaaagatgctcttccaatcttttaggtgtaatacatcagtgttaacactcactcattcatatagcaggggtaaataatcaagagtgtggcatcatagaagcagcaagtcttgaattgtggagagtcctgcttttttgttgtcattttattttcagtttagctgaaagtacacagtcttccttgtttcgaacattttctactttatggcaatagattaaatttaatcatgttttagttcacaaattgtttcttggtgtatatgtgtttttattttccactatgtcattattccaaaagaatctactgctcttctggttaaattcgcttaccaacactctttgcctctaaaaaaaaagatgaataacagagcccaatttgaaatggccatctctgttactccaattaacatactgtatatacgtgtgtattgcaaaaaataactagattttcctgggcttggcatcactaaaatgtccaaaaaatatcttattcccatgaacataaacttcaaaatgtcaactgcatttacaattatgaataatagcgagctgccattcccaagggaaataatgaaagaaatatttcatagtttttttagcaaaaacaaatgatttgcatgtttccaccaaaagggaataaaaccgttaatatggaatatccctcaggtctcctttttggaaacaaaattcataaccacctgccatttgatgaaatctaataaattcctaatatagcatacactcctccaaagtgttcattgttcaaagaaactcaagtgaaaataaggtatgaaatccttatgtgcacagagagataaagataaatgcagcatttttaaaatatctgtttttttctagtacaaagaaaacatatcggaaatattaaagtgagaataatttcatcccacagcaatagtttcaactatactttaattctaccaggtagactcacacatttccttaatgggtgtaaaatttattaacaacattttagttctgtttttcatagagaatacacataaaccctgtgttttgattcatgacattttattcctattatttatccaaagggtaattaaaatttcttttttgatgatgtagatggaatatgaaaatagaagggaggttattgacccattaaatagttaaatgaaaatcaccttcacagatgtttggtggagaaaaatatgctatgcatagaaaagctgaaatgtttttccacaaatgttaggcattgggctgaaattacaatagcctttcatgtccagttttgttacaattccattaaggcaactgcagagattggcaaatagctgttaccataggagagtcaccatatgtaatatagtttgtgctagtcattgtgtaagcattttatatacatactctcattgacacatttaacagcctgtgaagttcctattttattcccacctcacatattgagaaactacagctcagagaaacaaagtaaactgggttcctacttgaacctagtttttatgtactatgcatggtttcatatgtttacagatatacatatataaaattttatttatatataatatattatatatataaaataaaccgtaaagtcagaaatttagaatgaaatttaatatgactataatttatttgctgattccaagataggcatctatattttcccaacattaaaataaagatcatctggacaatcttctaaccaactccgaacagttctttctggagtttttctccttttatttctcctacttggagttgtaggagaaatctgtgtctcagagaaataaacaaaaggtgttctattttaaaataaaaagacagaaattagcagcttggacatttcacaaaagaagctaattaattaccaagctaactggaggtttcctccattcatgggcatactggaattgcaaaatctagttgtgagcatagaataatatctataaaaagtcttcaagatagcatgaaaaacatagcataatatcagtaacaaatattttataatgtctaaaattttataacttcttttgtctattttcttaaaactcccttatgccataatttggctgtatttatgtgataaacacactcttatctttgtaatgaatttttaaggaaaagacagaaccatgtaaaatatgcttttgaaaaatgggcacattatgcatgtgaatgctctctctctactaattaatgtaatgtggcagtatccaacaaaccagagcagatggggctctaagttgtaccagcctgtgccgttcttagggggaacaatttttgttcacatctctaaataaagagagtgagattttgggaaggatagtataatttaacaaacagcagagagtgtgaccattcagactgctttttcctgtcaaccacttgaatgcaaaacctgtttcagagatgaagcaatagaaagtattggaagcaagacagatacgagttggaatcccaaccattgccatgggtgaccactaaacctcagcttcctcatcggcagtatggggataaccatagtagcaaacatttctaaaggtaattgtgagaagtacttttatgactgcacaattaatgctgcttctagtaccactacaactgctgctattctattactatcagtgcctctattactatcagagccacagagctctagcttataagcccatctattcatttctagactgacatgatcatttttgcatattctcattgcctcccatttctaccttctctaacttatcctgcaaatcactacctaattatatgtcaatattctgttttgaactctaggtaagtgctttctctatttcaattttaaaaaagaaattcttgctccaagtcagtgattctccaccagggataattgtaatgtacagagaacctttagtaatgtctgaacaaagcatcttgacccacaggggacatttagcaacatctagatgcacttttggctgtcacaactagaggtacaggtactactggcatctagagatagaggccagggaagcttctaaacatcctataattcagactcctcttgcctgaacatgaagtacacttggggcaataaaagaaatcacagcaaatcttgctgtgcgcccctctgcgccggagccggcgccgtgccgctctctgcgccttcttttctcaccatggggaagcgtttggggtcgtcttgagggaccccctagatgcttctactcagagcccccaaagccggggagcctccactcctctgtctgcagcctcccctgtaggttctcgctacccagggttcagtggcctgggggctgatggaggtggtcgcctctgccaaggcccctcccggcacctccctggctcatccaggccaccttcctcccacgctcgctcacgcaaagtgctctggtcaccaggagcccttcctgaccagccccggccccttcttggccttcgcccacctggcctcccctggagccctgacctgggtgccgggcctgctgggtccagagcccaccccgccctgaacaaccccgagtctcagccaccctcagctcttaccctttcacagctggggactggagcctgggcctgcgcctctccgcgcctgcgccgccgctgtgcccctcctcgccgctgtccgcctctcagccgctgtgcccctctccgccgctgtccgcctttccgccgcgccgccgctgtccgcctctccgccgcgccgccgctgtccgcctctccgccgcgccgccgctgtccgcctctccgccgcggcgccgctatccgcctctccgccacgccggcaccggcgctgtgtgcctttgcaagggcggagctgcgttctcctaggcacagacccggagagcattgcgagggcggagccgcgttctgctctgcacagaccttggggcactgcctcgctttgggacaactcggggccgcatcgacggtgaataaaatccttcctgtttgcagccctgtttgtggttggtggcagcgatggacaatgcagccagccagagcgtagaaaggcatcggggtaagtgcactatccaggctgcactgcgggtggcctgggacgggttgggagccctatctcaggtgtcactgcccatcttgggtggctggttgggtgtgctatctgaggctgtgctgcctgcacctggggggtggtttgggggctcaaaccggggctgcactgcctttggcggggagccggttgggggcactatcccagacggtattgctggcaacagtgaggtgggctaagtgtgctatccggggctgcactgtgcggctgtggggtggggggtggcagtttcgggttgagggcactatggggtgctgtaatgcccatggtgcggggaggcggggcggttagggtatgttgggtgtgctattgcggggggcgacactgctggtggtagggggcaggatgggttgggggccatatcaggggctgcactgattgctttagctaggatttcaggtactatgttaaacaacagtggtgacggggggcatccttatcatgttccagatcttagaggaaaagctttccatttttccccattccatgattctagctgtgggtgtctttcctgtagtttttattatgttgcggtatgtttcttctgtgcctgtttctttgaggatttatagcatgaagggatgttgaatttcatcaaatgctttttcggtttcagttgacgtgatcatactgtttttgtcatttatttggttgatatgatgtatcacattgtatgttgagtgactcttgcatcccagggatacattcccacttgatcatgatgaattatctttttaatgtattactgaatttgattcactggtattttgttgaggatttttgcatcaatattagagatactggcctgtagtttccttctttgatgcttttatctgatttttgtatcacagtaataatggtctcatagaataagtttggaagtattccctcctgtttttcaaaatagtttgagcaggattcgtactaggtctttaaattgtttgctgtgaagccatcagcagtgaagacatcagttcctgggcttttctttactgggagactttttctgatggcttcaatctcattacttgttaccaatctgttctggtcttggatgttttcattgtttaacctaagtaggttgtatacatctaggaatttgccaatttctactaggctttccagtttattggcatataatagccagttatgatcctttgaatttctgaagtattagttgtaatgtctcctttttttaatctgttgattttatttatttgaatcttgtctcttttcttaggctggttaaaagtttgtcaattttgtatagctttccagaaaaccaacttttcgtttaatcttgtgtgttttttatttcaattttgtttctgctacgatcttagttattttcttattttctgtttagtttgttcttactttactagttctttaagatgtattgtttatttgaagtttttcttttgtttggatggtaggcacttatagctgtaaatctctgcctttgtactgctttctgcgtaacaagttttggtatactgtgttttcattaccctttgtttcatgaaatttttgaatttctgtcttagtatcttcattgacccgctagtcatttattcaggagggtagtatttaacttccatgtgattgtattctttccaaaattacttttcttattgatacctagttttattcctttgtagtgaaagaagatggccacggagacagacagcagcgtggttagagtggtaggagccggccatcagcgagagctgctccttgcctggctgctgggtgctagagcctgcggcccactggcttgcctcactgtggttggtggtggcggtaacagagactgcagcacaaccagagtggtaggacaggggctatccagggctgcacctttcgcagtgtggggtgggttgggggcgctatccagggtgtcattgcctgcattaggggtactggttggtagcactccacagggctgcactacccacggcagggagggtgggttatgggtgctttctggggctgcaatgcccatggaggaggacaggttagggcactatcgggtatacgctactggtggcattgggggacggaggtggggggcgctattgagggcagggctagccgtggagggcgggcgagttcggtgctatcaggggctgcactgctggcggcggtcaacagagttggcatccaaggaaggagtggttctcctctccctgactccacactccagagggcgacccactcttggtcatactggagtgtggcagggcacgcagcgtttgcatgggaatcctgagcatggcagagcccccacacccaccgtggttcctgggcctgtgcactctgggtctgtgcctcagaggctgccaggcacccctggggacaccacgggggacagggccctgtgtgtggaggcgtccggaacaggaattggcacctgggtgtggagggctggttgggtctgaatttttctgcttctcctgttccccgaggagtgcagccccggtgggcccaatggttcctgtggagtggggagctggaagctgtggtgtctccagcacccaccccagactccagttcccagacagcttgggccaaaaggagaggctggactttggagggtgggtgtgagtgcctttgctgaaactggcccctgccacccagtggctggcatgacaagtcgaggctctaacacttccactcctcacaacttcctctaggcttttctggctttgcccacccagctgctccgtgccaggaagaggaggagacacctagagcctgcaacaccacggctcgcctcgctgcaggtggatggcagtgacggaggctgcagtgcgccagagcggtaggagagcggctgcgctaggagggcaggcggctgcaggcagggttgggagtcaggcttacagcgatggacgggctgcagcagtggccaggtggtaggagccttgtagggagggctggtgcattggcaatgggcctggctttgccctgcgcctgccgtggatctggccctgtactgccctgccttgccctgtacctgccctactgttacctggactgtctcggccctgtcctgctctggtcccatcctgaccgtgtcttggccctgtgctaccctgtccctgccctggtcttgccctggcactggccctgccctgaacctacactggcctgaccttggctctggccctggctctggccctgccccttgtcctgaccctggtcctgtcatggcactggccctgccaatggtcatggtcctgcccctgttctggccctgacctggccttggaaatgtcctggccctgctttggcccatccctgccctggccccaccatgggcctgcctgttctgccctctcctggcactgaccttgccctgtcatggcccagtggtgccattgccctgccttaccctgcgctggttgtgccttggccccgcttggtgctggccgctccctggacctgccctggacctgccctgaccctgccttggcttttgccctgccctcactatgggctggccctggccctagccctggtcctgccatatccctggccctgcccttatccaggccttgcccctgctgctgccctggccctggcctggaacctggtcctgtcaaggacctgccctgactctgccatggccctggccctgctctgccttgttcctggccctgacccagacccagacccattcctggctctgcactggcctttccctggccctgagctggcagtggtctgcccctggtcttgccatcaccctgccctgctgtgctctggatgtgtcatcaccctgccctgcccctactctgcctttgaccctgccctggccttaccttggccctcaccctagtcttcgctaggcccagcacagacctggctctgaccctggccctggtctttgtcctgccatagccttggccctgaagtggacttggaggtgtcctggccctggtgtaacatggctcttctttggcctgtctcagccctgcccctaccatcgccttgccctgctctgccctgccccagtactgacccagccatgctatttcccttccctaccctgccttggctgtgccctggctcggttctggccctggccccggccttgccctggacatgctctgacactgcctcagccttggcactagcctggctctttcttggcatcagccctgctctctctgtggactggctcttgtcctttcctgccctggccataccatgccctgccctgccctgccctgactcagccctgactcagccttggccttggcattgtccctggtcctgccatatttcttgccctgtccctaccctagtcttggccctgacccttaccttgctgtggccctgcccttgccctaacgcagcccctggtcctgtcatggccctgccctggacctgtcctggccctggcccttccttgcttgagaccttgccctggttctcccctggccctgaccctgaaatgcctggccctaccctggccttgcactgctctggcccttgccctgactctggtcctgtcactgacctagccccagccctgttgctggtcttaccatggcccagaccctgccttggcccttccctgacactgtcctggaccctggctgtgccaagaacctgcactgtccttgcccttgttttgctcctgccccgaacctggtccttcccaggccgtggccgtggccctggccctggccctgcccaggtcttggcactggcctggccctgccctgccctggccctatgctttcctggccctgccttggccctagcctggctttgaccctgccctggccctaccttggccttcaccctagccttacctgggcactgtgtttgacctggctatagcaaagacctggttgtagccctggccctgccgtggccttgtcccagaccctagccctgccaggtacctgtcctggcccagctctgggcctggctttgtccctggttcttagatgaccctggccctgcccctgcccttgcccttgccatggcactggccttggacatgtctgtggtcctaaccctggccctgccctggagctgccactgtcttggccctgccctggctctggccctgccccagccctggccctgccccggccccagccatagacctgccctggttggtcgtgccctaccttaaccctgtgctaccctgggcctgctccaccctgccctggccctgccctccctttgggcctgctctgaccccgccttggccctcacactggccctagcacagacctggtcctatctgtggccttggcctggcattgactcctgctcctgaccctggtcctgccatggccctggcagcccttaccctggccctgtcttgaccctggccctgaactggccctgccctgacctggccctgaagtggatttgcaggtgtcttgtccatgatttaacctggtcttaccatggccctgtccctcccctggctctgtcctggtcttgtgctgaccctgacccagaccttggccctgccccagccttgtccttgacctggccatggccctgcctctgccgtggaccggcactggcactggcatggaccctggccctggcccttcactacttaaggccatactctggcccagccctggtcctgaccctgtcctggccctagccccgttgctggtcctgccatggcccttgtcctgacattgccctttcctggttctggccctggccctgtcccagccctgctctggccctggtctgaaccctggccttgcaatagacctgccttggtcctgcccacaccctggctctggccctgcctctgccctggccatacccttgccctggcctggaccccagtcctggtccttgtcctgccccagccatggccctggccctgccctgcctgtgccctgttctatcctgggctggccctgccatgacctggtcttgccattgccctgccctagcctgccatgcttgtgccctagatctgccccgcttgtgccctagatctgccccagcctttgcccctgtcttggttctaaccttgactcagcctggaccttccctgaccttgcctcagccctggcactaccctggccttgccttggcatttgccctactctctctatggcctggctgtggtcctgccctgctctgctcttgttctgtcctggcacagccctggccctggccctggccctggccctgctgtatcactggctctggtcctgcccttatgcagacctgaccctgccactgccttggctttggcctggaccttggccatacagtgaccctgccatgaccctttcctggccctggcctggaacctggccctgccaaggactcgccctggctctgtcatggccctggccctttcctggatttggatgtgtcctgtcccttatttgccccggcccttccctggctcttccataccccttctctggggtagggccagggtcaggaccagaccagggcagggtcaggaccagaccagggcagggtcaggaccagggtagggccatggtaaggcctgaagatgggaagggccagggcagcggctggaccagggaagggtcagggccagggatgtagtaggactaggggcagagccagcactagggctgagccagggcagagcaggagagattactttaggttattatgtaaaatttttattttagatttttaagataactatagtagtagtaatgtctatactatgttgtttgtaatagtaataatatttgtagtaatcactaaattttaactaatactatctttgcttccagtagtgttctatgagtataattttatcaacatgtaaatatgtgaggcattgattctcacaataattctatgtgctaggtacttaaagcatctccattttccaaatgtaggaaacaggcataaagaagttaaatacttggccagattactcctgtaatcccagcactttgggaggccaaggcaggcagatggcttgagctcaggagtttggaaccagcctgggcaacattgtgaaaccccatctctactaaaaatgcacaaaaagaactaatttaagtttcttgtaggattctggttataaaacactggtcaaacacacagggcatggatagggcagggccagggacaaggtcaggccaggaaggggccagggccaaggcagggccagagctggaattggaggtgtcctggtctgatttgccctgccccaacgttggcccagccctgctctggcacgtcctgtcatgccctgtccctggcctgagcattggccctgtccctgtcctgcttcttgccctgccccggagttgaccaggcactgccatggcccagtcctgcattgccctgccctcctctgccctggtgctaccatggccctgcttgggccctagctctgcctcgactctggacctgccctgactctgctcagccctggatctaccctgactctgccttggtgttgccctcccatctctatggcctggctctggccatgccttgcacaggccatgctctgccctgcgtgccccagcctgggcccagccctcatcctaccatattcctgaccccagccatacccttgttctggccatgaccctgccatggccctctcctggcccttccttggtcctgccctgcccttccatgccctggccttgccctcaccctgcattggccctgcactggtcctgccctgccctggcactgccttggccctggcccgccttctccctggccttgcctttgccctgccctggcctgaccccaggcctaccgagtccatgaaatggccctggacctgccttgccatcctctgtcctggtcctgtattgtccccaccatgctctggtccagtgcttgccctagccctgttgctagtcctgccactgctatggccctgctctgtttttggccatgccctgtgctaccctagccctgccctgccttggccttggccctaccatggccttctcctaccctggcctggccatacactggccttttctaccctggccttgcccttccctggtcttgccctgccctggccttgccctgccctggccttggctttgccttatcctggtcctggttctgccctgaccctggccttgctctggccctgtccctggcccagccttgaccctgaccctggccctgacaatccccaggtctgacactggccatgcttggccctggcccctccttttggccctgccctgtccctgccttggccctgtgctatcttagtcctgccctggccctgaactcgccctggccctaccctcaccctacactggccccgccctaccctggccttgccctgccctggccctgcctttggcctgctgtggctctggttctgccctggccttgcccttgccctggactctccctggccatgttttttccacggtccttctctggccttgcccttgccctgtcctctttctggtcctgccatgtttctggccctgccctgtccatgtcctggacctgactctggccctggatctccctgtccctgccctgccataccctggcctgttccttgctctacactgaccctgccctgccttggccctgtgctaccctagtcctgccctgaccttctgctgaccctgatcctgccatggccctggccctgccatgtccctgtcctggccctggttctgccctgcttctggccctggccttagtcctctcatgtccctggctgtgaccctgcccctggtttttctctggccatgaccctgccccagttctgtcctatacctggccctgtctcagttctgtcctagccctggcctttcacagtactttatgcttagtaagggctccatggtgtctgtgagttgaatgttgtgttcatagcatctgccaaaacagaaacaaaaaaacaaaatattttgataagaagttaaagctttgtatataatatgccttgaattgttagtgcctgttattagttgtattacatataggtcatggttttgtacacataactccaaaccattgatactgttaaaagaatatatgaatatatgaaagaatgtgtaaacgtaagaatgtatcagtatctaatgacctttccaaattaatttttatttttagctctattagatttttctcagtgtaacaaatgtttattcctatgtaattaagggcgtatttcctgtccagaatattcatattacctaattgaaaattatatgatacaaaaatataatactatttttaggccaggcatggtggctcatacctgtaatcccaacattttgagaggccaagtttggagaatcatttgagtccaggagttgaccagcctgggcaacatagtgagaccttgtctttattaaataaataaataaataaataggttgggcactgtggcttatatctgtcatcccagcattttgggttgccaatgcaggaggattgcttgagcccaggagtttgagaccagcctgggcagaatagcaagactccatctctacaaataataaaatattaaccaggtgtggtggtgcgcacctggggtcccagctacctgggaggctaaggtgggaggtttgctcgaggttgcagtgaactgtgaatgcaccactgcattccagcctaggccacagaacaggaccttgtctataaataaagaaataagtaaaaatataaataaaaataagtaaaaataaatataagtaaatataaatataaatacatataaatataaaaatgcatacatgaaaagaaacgatttttaaatttaacatcactgagggcatcctatccatttcatttcatgattccatcacatcatttcacttagatgaaatgataagatgacttgagatgagatgaaatgacaaaatgatgagatgagatgagatgatgagatgaaattttgagatgaaatggtgagtagaaatgatgagatgaaattatgagatgaaatgacaaaattgaaaagaaattgaaaggagatgagatgagttaaaatgagatgaaatgatgagatgatggatgaaatgatgagataaaacgagccatgaaatgatgagatgaaatgaaatgaaataatgaaatgatatgaaataatgagattgaaatgagatgagatgagatgaaatgagataaaatgatgagatgaaatgagatgaatgatgagatgaaatgatgagatgaaatgagatgaaaaatgatgagacaaaaaatgagattaaatgaaatgaaataatgaaaggaaattatgaaatgtaatgatgaaattgaaatgaaattgaaatgagatgagttgaaatgatgagatgtaatgatgaaatgaaatgatgaaatgagatgaaataatgggatgaaatgagataatgagatgagatgaaatcatgagatgaaatgatgaaatgaaatgatgtatgaaatgatgagatgaaatgagatgaaatgtaatgagatgaaatgaaatgacataatgaaatgaaataatgaaatgagatgaaatgaaataatgaaatgatgaaataatgaaatgaaaatgaaatggaaatgatgagatgagaagaaatgatgagatgaaatgatgagatgagataaaatgagatgaaattatgagatgaaatgaaatgagatgaaatatgatgagatgaaatgacataatgaatgaaatgatgaaatggaatagtgaaacggaaatgatgagatgagatgcaatgagttgaaatgagatgaaatgatgaaatgatgagatgaaatgatgagatgagatgtgatgaaatgatgacatgaaatgatgacataaaatgagatgaaatgagatgtaatgatggaaagagatgagatgaaatgagatgaaatgatgaggtgagataaaatggtgatatgaaatgatgagatgaatgatgagatgaaatgagatgaatgatgaaatgatgagatgagatgagatgatgagatgaaatgatgagatgaactgatgagatgaaatgaaatgaaataatgaaatgaaattgaaataaaattgaaatgagatgagatgaaataagatgagatgatgaaataaaatgatgaaatgatgagatgtgatgagatgaaatgatgagatgagatgagatgaggtgaaataatgaaatgaaataatgaaatgaaattgaaatgagatgagaagatacgagatgagatgaaatgatgagatgaaatgatgaaatgatgagataagatgaaaagagttgatgagatgagatgaaatgagatgaaaagagatgaaatgatgagatgaaatgaaatgatgagatgaaatgaggtgaaatgaaattagacgaaatgtaatgagatgaaatgaaatgacataatgaaatgaaaaaatgaaatgacataatgaaatgaaaaaatgaaacgaaataatgaaatgagttgaaattaaatgagatgatgaaattaaatgatgaaatgaaataatgaaatggaaatgaaacggaaatgatgagatgaaatgacgagatgaatgacgagatgaaatgatgaaatgcaatgatgagatgaaatgatgaaatgatgagatgagatgagatgtaatgatgagaggaaatgatgagatgtaatgaaatgagatgaaatgaatgagatgaaatgaaataatgaaaggaaattgaattgagatatgagatgaaatgatgagataaaatgagatgaaataaatgatgagatgaaatgatgaaatgctgaggtgagatgagatgaaatgaggagatgaaacgatgagatgaaatgaaaggacgagatgaaatgatgagatgaggtgagatgaggtgagatgagatgaaatgagatgaaatgatgaaatgagatgagaagaaatgatgagatgaaatgagatgagataaaatgatgagatggaatgaaatgaagtgaaatgaaatgaaattgaaatgagatgagatgaaatgagataaaatgatgagataaaatgatgagaagaaatgagatgaaatgattaaatgatgagatgagatgatgagataaaaaatgataagatgaaaaatgatgagatgaaatgagatgaaaggaaataatgaaataatgaaatgagatgaaatgaaatgatgaaatgatgatattaaatgaaattgaaagatgagatgaaatgatgagatgaaatgacgaaatgttgaaatgaaatgatgaagggatatgacatgaaatgatgagctgaaatgatgagatgaaatgagattaaatgatgagatgaaaaatgatgagatgaaatgatgagatgaaatgagatgagatgaattgagatgagatgagatgagatgagatgaaataatgaaattaggtgaaataatgaaatgagatgaaataatgaaataaaattgaaatgagatgagaagaaatgagatgaaatgttgaaaagaaaggaggaaatgatgagatgaggagatgaaatgatgagatgaaatgaattgagatgaaaaatggtatgaaaaatgatgatatcaaaaatatgagatgaaatgaaatgagatgatatgaaatgacataatgaaataagtgaaattagatgaaatgaaatagtgaaatgaaatgatgaaatgaaataatgaaaattaaatggaaatgggatgagatgagatttgatgaaatgatgagatgaaatgatgagatgatatgaaatgatgagatgagatgggataagatgaaatgatgagacaaaatgatgagatgaaatgatgagatgaaatgatgagatgaaatgatgaggtgaagtgatgcactgtcacgtgtgtgtctttttcccaaccaacaaaaattataattcattaattttactttattatttaagaatattcttaagagttgaaggaaaaataatatctgtacattatgggttacaattaagtataaataatacataaatatattaaaacttacaaagaatatatttcggaatcgaatataccatgcttctgtgatgacagttatttcatgctggttgtcacaattttacatgaaaaactaatgaaaaaatgtttttaactgtttctaaaaataacagtttccaaaacagttttacattcaaaatatgaaaaagatgtatttgtgttccttaatctgatgagattttcacactctgcacataattgttagatttttattgtgttgataaattgtatatcaaataaaaaatgttattacctcttaaattaggatttttaggtgatataggcagaaaggaaggtaagtttttataactttgtctaaatgaactttctaaatgcctgagtattaaaagatagcatgtctataaatcacaatgtatatattactgtatgacgtaggacaaatcaaaaccattacctctgataacattatattgtgcccagtataaaatagatataataatacctcaaacttaaatccaggcattgtcattgaatatcttaagaatatgcagcaaaggtgcttttaaaaatacaagctagtgattgtactaaatttgtaaatcacatagggtagtgggtcattttaagaatattatttcaatctataaacgtggatgtctttccttttttgtgttttctttaatttctttcattaatatttgtcatttttgttgtcaaaatcttttacttccttggttaaatttatctctaagtacatttttgtagctattgtaaaaggaattgctttcttaatttcttgtttcagctagtttactatcaatatgtagaaatgctactgatttttgtatgttgatttatatcctgcaactttattaatttcatgtatcaccctaagaagcttttggtagagtcttatttttttccatgtataagatcacattgtctttaaacagggacaatttaactgtctcctttccaattcagatgtcttttatttctttctctcacctaatcgtcctggctaagactttcactatgtgaaatatgattggtgaaaataggcatccttttcttgttccagtataatctttttcttgttcacagtaaaatctttcaccttttccacactcagtatgatcttagctgtagatttgtcctttatgtcctttgtgttaaggcatatattttctatactaaattgatgagaggttttttgtcatgtaagaatatttaattttgccaaacgcttttattgtgtttattaatttaaccatatggttttcagtatatatccaaaggaaagaaaatcagtatatcaaagagttacctgcacccccatgtttattacagcactatgcacaatagccaagatatggaatcaacaaaagtgtccatcaacagatgaatggataaagaaatgtgacatacatatataatggaatattatttagtcataataaagaacaaaatcctgttatttgtggcaacaagaatgcaagtggagggcattatgttaggtgaaataagcctggcatagaaacataaacaccacataactacgtgttctcacttatgtatggaagctaaaatttttaatctcgtagaaatagatagtagagttttggttaccatatcctggaaagagtaggagacagaaaagtataagaaaaatgtggttaatacatacaaaattacagctggagagaaggaagaagttctagttctctacagcactgttgggtgactgtagttaatgggaatttattgtgtgttttcaaataactaaaataaaagattttgaatattctcactgcaaagaaataatacatgatttaggtaatggatatgataatgactctgacttgatctttacgcattgcataaatatatcaaaatatcactctgtaacccataatatgtacatttattatatgtcaattaaagtaaatttaaaagagaaaagatgaggtaaaggtaaatgtacagaatttaattgctttttcttctataaaacccgagtcagtaccaagaagaatcaatttattagttttctaaaataaaaaaaatcaaaatctccaaaaaagagcaatatccaagaaaacattgaaaatgaaacacaacatttagtaagaatagaaaacttgggcactgtatcaccctgttcctagataccgatttactgatggccatttaaatagaattttattctatctaattcatttatactcccagagttcaaaattacattttacctacaataaatgagataacacttgtaaattatatggtactctgcctaacacacgttaataactcaatacatgttagcaataaacttttagtatagtagtcaaagtattaatttctcacattgcaatttccttcaaagacatgaatacaacctttctaatgactccttgttcatcaagatacctcttcaaattattctatttgtttcattcagtatattgtctgtgcataccgatattacactcttttctttttttgagatggaatctcattctgttactgatgctggaatgaggtggcacgatcttggttcactgcaacctccacctcccaggttcaagcgattctcctgtctcagccccccaagtagctaggactacaggtgcacaccaccatgcctggctaatttttgtatttttagtacagtcagagtttcaccctgttgtccaggctggactcaaactcctgacctcaggtgatccacccaccatggcctcccaaagtgctgggattacaggcataagccaccgcacccagcctgatattgcactcttggattttgaacactgaatatctttttgaaagattacacctcttcacctcttcgtgcttcagaaattattttccttcaagtgttctaagagtctaatgaagaatgaagtcatgttttatcacttttgtccttaaagatttcagacatgctgaaactgattgaagtatcatttgctacccgatagattaattatctctagttgtaggagtggatacatctttaatggtatatttttggtcattgtcttatttttgatgtagtattctatcaataatttattaaacctggcatccttgggtgagcatagatttttcaactttggtgttatattgtgtttgcttttaaaaactgcttttgaggccaggtatggtggctcttgcccatacccagcactttggaaggccaaggtgggcggattacctcaggtcaggagttcaagaccagcctggtcaacatggcaaaaccatgtctctactaaaaacacaaaattagccaggcatggtggtgcatgcttatagtcctaaccactcgagaggctgaggcaagagaatcacctgaacctgggaggcaaaagttgctaggttgctgtgaggcaaattcacaccattgcactccagcctgggtgaaaagagcaaaactctgtctcaaaaaaaaacccaccaaaaactgcttctgaatggaattgtacatgcaattttgatgaaaaaaattatcaagtgcataagttcataatagaaaaacaaataattctccaggcacaagttagtactaaaaaaattatgttgaatattctctaatacaacatgctttttcccttcatgaacaatttgtgttttactgagaagagtcattgtttatggtagacattagaccacagatgaatatgtactttaaacactcttagttactttcttaattttatatctgctgcttcatgcttctgtttattttcattctttccaatgtccacattctagtaaatttgaatattttaatccgtttatatactatttaatattgcttgtatagtttagtattgttaagactcaaaaaggtttacagaaagaagaaaaagatcaacatgttattaatcatttaaagatcttttgaaatctttgacctttatattttaatgaataaaatattagtagttattagtataaaataatttatgtcttttggacttagcatccagtatttttttaataaagaaaataattattctcttgcaatatactatgtttatctgggttttgaaaagtgctgtttcctaatatgagaaagccatttacatttttaaatctacaaaggcaaatggaatggtactaaattatttacataataatgtttagatggtggcccttataacattctttctatacttcctacagagttgcagatatgcaatcatagaatatttctgggagctaatcctttagcttgatgaatgaaacaagacttttaaataaaattaaactttcaaattatccaggtaatgggcctgtcttttaattcaatggatatggagcataatgaattatctctgttcattgggtaataagttttcattcttctaatactcaaaatgtcctttaatttttaatagtcatatcattatccctaggtattttagcttctatcttaaactctaaaataattttgaaacaggagaaagtattctttattactatatgtattaaacatcatggttttcaaatttaactgcaaatgtatcttttcattgcttcttggtgatgcccttcaccctatccatattgtcactaccaagtggtgattacttttcaggttcacatacttattctttagaaaaatctctgtgccttataaagaatatgattgttggcattcaaaagccagcgaagtatacattattagcctgttgcctaactcatttctttaagaaactacactaattacccacatacttatgtttttatttcctcattatttctggagaaaacaaatactgctaacatgatatttgtaagagagaaaaaagtcttttcttgaaaagtgctgtcattgtagtactaacttatagtatcaacttctttataaactccttatacactttttattctgagagaaataaaaaagctaaaagtgaaatgacttttttaattccccatattataagcacccatgttggtaatttagggtctttatagttagggtaagttgtgtcataccgagattacaaaataaaaagtattttgtctctttgggcctttccttattcagtaatactgtcagtttggctttttttgtaggtcaacttattgatatcagtattctgaaataatatgtttactatcttttgataagcatttaaaatattagatttattgttactcttctgccttcattgggctggaagaataattgtttctcactccacaaaggccaagttgcagagaaaaacacatagacattcaactgcaaagcagagaaacttgactatttcctgcagttttaaagtgtatattgaataaaaccatctttttattttcttttttgctcactgacaaatattaacaatatcaagtgtgttattataatgttatctagttaaaaatctcaaaaagttttcataattaccatttaaagatatataagtaggtgacctaatgttaatttttattgtctgagaccatgtctgttatttcactctttaaattcaattagtaatgcagaacctagcacttagtactcaaaaattatttgctggataaaaaaaggttaaacatgtaatatatacaaaatgtactggaaaaaatgcaccaaacaattttgttataccagtttaatgtagaatattgcctttaaaagataatatagttttcaggtgtctacagtgattttgtaatatttgtgcacatataaaataatatttccaaaaatgtaatccagtgaggaaatatactctctaaattctagatttataatttagggtttaaattataaaatcattaaataagatacaagtgaaatatagtcaaatatccccttggaaaaaaattaagtggcctttaaagtgaggtattcatatatgtaattttacaatcctctagtgatagaattaattaaataagccaccaaattgattaattcctacagtgttaaaagagaagcactaacaataccggtgaccatgtaacatggatttaagctacaagtcatagaaatgtgatgagaagcctcagcgctgtaaaacagagggtggaggaaagcttttcctctctcaaatgagctttgcgaggtatacttcttgaaggataggaagttgaagtgttcaggacttttatgtctattctactttggcttagtttacatgattcttagtttattagcctagaaatggccaagaaaacttaaggctcaataattagttataaatatgaaatatccccaatttttaagataaaaacaacttataaatgtatttgtctgtaaaaattgtgtatatttttacagaacatctatttctttttttcttttttaatttttttattatactttaaattctagggtacacatgcacaatgtgcaggtttgttgcatatgtatacatgtgccatgttggtgggctgcacccattaactcatcatttatattaggcatatctcctaatgctatccctcccccctccccccaccccacaacaggccctggtgtgtgatgttccccttcctgtgtccaagtgttctcattgttcaattcccacctatgagtgagaacatgcagtgtttggttttttgtccttgcgatagtttgctgagaatgattgtttccagcttcatccatgtccatacaaaggacatgaactcatcattttttatggatgcatagtattccatggtgtatatgtgccacattttcttaatccagtctatcatttttggacatttgtgttggttccaagtctttgctattgtgaatagtgccgcaataaacatacgtgtgcatgtgtctttatagcaacatgatttataatcctttgggtatatacccagtacttggatggctgggtcaaatggtatttctagttctagatctctgaggaatggccacaccgacttccacaatggttgaactagtttacagccccaccaacagtgtgaaagtgttcctatttctccacatcctctccagcacctgttgtttcctgactttttaatgatcaccattctaactggtgtgagatggtatctcattgtggttttgatttgcatttctctgatgggtctatttctttaaaacaaagggaggggagtctctcatttacattagtttttttcatagccttttggactttgcaatttctatgttttggaacctatttcttacagtttttctatgctaaactctgtcctggtcagttccagagtgtatgaagaaccaaatgatgtaattgtatgtgacctggctgtagtggaacaaatttgactcttaagtatgcaggctctaattttcctgtctggttttggtaagtattccttacataggttttttctttgaaaatctgggattgagaggttgatgaatgaaaattaatcctttcactttgttgtatataagtttgcaataattaggtcagagtggagttttaaggtcatgaaggaggctgatgacttacaaataatgggctctgattgggcaactactcatctgagttccttccatttgacctaattaagcttatgaaatttacactaagccatgagctcatctttaaaaagtcttattaaaagattttcagctgttccaaatgggacttattagtggaatgtattttaaaggatcatatgagatgaatgaaaggtatttgatcctttctttccataataataaaatgatggtttggaaaaagaggctacagtctaaccacagtgctattattaggctttcttgttaaacataggtctaagcctaagtatgtcaatacaacaaatacttactgtttcatttctagtaatgaaaaaaaaaaacaagtctttctggcataaggatgattttcatctggttattttgaaacatttttgtaaaataagtttacatctatgaagaatatttttatttgtaaggaggggtatgtctctgtgcactggaagagagggaggactaaatcactgggaagtcttatgataaagaagccattggcttaaatcagcaaagcaagccatcccttggtttaaggtgtttttcctggccatcctgtcttgactagaactttacctacacattcctttttggtttaggcaaattatagtatctaaacctgaagtctcagctctgtgtctttgagatataaatgttctaccacgtcttctctggaacctgataactatctatctctttaaaatgcaagtctagggagatgactcatcagaaaaagaagaaaaaggtatttggaaattgtgcaaattaaagcagcccatgatgccaaagtctacacattcctgagtgagtcagttctggccagttctagctggatcaagagagctctgctgggcaggcctgaagagtagctggatggcagacacctgaggagccaggtgtctgaaatttcctccacctgcttgaggagcgccaaagcccaggtgctggctagacaaccccttctggctgcctaagcaggtggcagaggaaggaaaaaaggtcagaggcagagtgttgaaccctgcctcccaggtgggtggaagatgcctgtcgccaaactagggctcagcttaccgggtgagatgggtgaactggtgatctcccgagagagtggacgtcagaactacatggtcctggacttcacctaggccagtgaaggagagagagggttaatgttaactgcaggaggcccactctagccttaaattttgtaattcaaacccttcccttggagacaaaacaaacatgacaaggaattctgaggtcaggggacaagaatcacaagttccccagtgggagactgaggaggcagtgtcctttctgcccttggtctactggctaagaaccttcctcagcctgacctttccacattgcactttcagctctgtttgcaattttcctcctttagtgctgagggaatcccagtgttcgatactgaaatctatacattcctaatgggtggttaaaaaaaaaacctcagcaagagaagcagaaaatgtttcctcttcctgaaaaactgtagaaaggcaggcaccattctgggtgggacatggtccttgcaaaagtctttatggttttttttttttttttgagatgaagttttgctcttgttgcccagactggagtgcagtggcgtaatctctgctcactgcaacctctgcctcctgggttcaaggaattctcctacctcagcctcccgagtagctggaattacaggcacctgccaccatacctggctaattttttgtatttttagtagagatggagttttgccatgttggccatgttggtctcgaactcctgacctcaagtgagccacccgcttctgcctcccaaagtgctgggattacaggcgtgagtcactgtgcccggccaagattctgttttgatagaacacttgcgtctctctcaccttgtatttagagaagttagaaagtaaaagataatgtatatagaaagctttttgaagactcttaagaagttcataaatatggggcactatgactatgcatatgaaaatatttcctatcagttggcagttaccacctcttatagtggcatggaacctcttgagttaaaccaagactcagtgagattgggtgatttaggtagtgtcattttatgaacaaggggtaccctactcagttcttttattttattatacttctctttgacattcactccagtgaaagaactctttcaaaagacatcatgcctggtctcacggagattcaaaggtgtttgagtccttccttattatgcccttggaagatgctttgaggaccccagtgatgaatcccaagaactctgtctccattatccctggaatagggcacctcatcactctggtgttatccctgaagggccttcataataatgtgcttaaaagagtcccctattatgtccttcaggatggagcttgacttgcccaaattgctatgtacatgttaaagagaggctggaactgaagttggtcatttctcactggatcagtcaacaaggtttgagtactttctgtgtgctctgcatcattctgagtacagaataaggcatggctcctgccttcaaggagtatggaatttaatagaagatgacaacatacatgattgtaaatctatctacatgagagtgaataattgtgagattcctaataaacggcaagatatgttctgaaaatgtgaaacataaatgaggttgaagaaattgtgaaaagtttagcagaggaggaataattcgtcaggttctttaaatacaagtaaaggggaaaggaaggaccatttttaagtttagatattccaagggttagtggtgaggtggattatggtatgtcttctcgttgatgagggtggagactggcgaatagtggaaaataaagttaaatagctagggtggggccaaattatgggttttaataaaagccaggcatagaaatttagattggggtggtagaaaaatgaaggctttaaaagtttttaagccaatgaatgacatcatacaagttctatataaagagcagtgatttcaggatgggagagaatggcatcaggaagacccacttgaatgctggtaactaatgttactaacagtgccatcagtaacattaatgttactagggcctggactgatatgctgatggaagtgagaatgaagaataaggtgggatgaaagagattttgacaagagttttttaatgaacctgaaatgggaaagggcgagattgactaagcctgcttgccatggacagcaatggggttgctagaagattagctgtgcggaaaaagttatgcatttacctttgggcataatgaaatgcaattgactctccatattcatgggttctgcatccaccaattcaaacaactgtggaacaaaattgtcagaaaaaacaatacaatgataaaaaatgatacaaataaaaaacaacatggtataccaactatttacatagcatttacatcgtattaagtgttattaagtaatctagagatgatttaaagtatataggaggatgtgtgtaggttatatgcaaatactacactattttataccagtaacttgagcatccatggattttggtatacaagggggatcctggaacaaattcgccatgcatatcaaaggatgactgtatgagttatctgtaaaatggtttggttgaaatgtttagaaaacagctagaaatacaagactggctgttggatgaaaaaaacataggactaggaaattcaggtatgctagtctttttgagtattgcttaaagccatgggaaaagagctctctgtgagttccaagacagatgcaaggactggcattcatgcacagcttctagcagttaaatctgaagagttcttagtatgcatgttgactgtaattactttagaagtaatttttctcctggtgataaaaggcatgtaaggctattttaggaaattgaaaaatgcaaaaaggtataaagaaaaagaaaagataatcattaatagtacgttagtaaacaagatttgactaaagatatgactttcctcccgcttgttttcttatgcatataaagggataggaaatatgtatgtatgtatgtgtgtgtataggatcatgcactatagcttgcttctttttccactatgataattttcccatgtcatgaattacggcttgcaagtgcttattcttaaagggctgcattatttttcattatttggatttattgttatttaaatggagctctattattgaacatttagattgcttccaaaattttttgctcttgttaatatattgtaataaacttctgtgaaacacatactcttcacctgctacttacatatgacttctgtaagccgagacctctgtatccccaggacctagaaggttacctggacatagtagtttcttaattaaaaaaaattattgattgaatgaaagaagactattaaatgttttaaatgttcagttcttctttttttattctgattccctgtgtatccagaggcctcctatttgtctgcatgtatgagtttggctgtaatgaaagtattggccatatatgaccataaacgggcattcctatttctgtcacagttatatttgtcattctgtattaatacatctataccctgatttctattgaagcatggttatttttgtttgcttctaagcaatgtagctaccctattgatgctgataaaaataaatttctgaacctataagactgaggattgggcctaggttgtggtaaattggcaagataatggatactaccctgtcaagagccctctgaagagaaaagtctgccacccttcaccaggtagaaactcctggcagtgccacattttccagtttgacgccctgtgataccctgaaaacacagatgtttgactcttttcaaataatattttaacatattttaagatgcaaaggcattgtgtcagacttttttcttaagaatgtatttcattaccactcagaagttagcttccaaaagaaataagtgtgtgcaaaggcttatgatagtggtttagagaagtttttaaaataaatgtgcatcttttatggtaataaaagcacattatgaagaattttttaggtccagttcacagattccttgtgcctggggaaaactttattagaaaattagatcatttctaatttgattaggggaagtctaatgggaaaactttttaactgagcggtccaattcaaaacatgaatatctgtgctggaagcttctattgaactttacttaagtcacatctaagaccctctgcctgtcagtccaccattaccctaacagtggtagaaattctttatatgacacctagatcttttttttgttgcacttttaaactgtgtaggaaacacactgcccacatgttcatacaacacagagtgattatccacttagttcctaaatagttgtatttggttatggggtttgatcccacttttccagggtttaggtcagctactgaagattaggatatctgggtacctcttactggagaatccattcctgttttcatttcattcctgggggtaatattcaatctggtgtggccctctgtattataaaatgtttcccagattgtgtttatctgaaatacaaatccaagaagaagcatggtgttaattgccgtgtaaaaaagattccagagtgaagagcttgagatgttctattccttccttcataggttcagttgtttaacccagcatttttcaaacatattttactcctagaacctgtttttcatcagacatatttaagaaaaaagcgttttgtagaacacatttggacaaatgatactttatatcattactttgttttttaaattttagtttgactcaattttacagtttcaggattttgtttctgtttcaggttttaagcttttcttttataaatagttactttcctagtctgaaatgtatacattgtttcagtaatgaattcattatgtaaatttgcccatcattcatctaaagggaataaatgttaaattgtttttttaaattttgacttgtgtcacatatgagaatataaagtatatctgtacaataaaggaaaatgaaacatcaaagtatctacctcagattaagaagcagagcttggccaggcatagtggctcacccctgtaatcccagcactttgggaggcagaagtgggaagatcacttgaagccaggagttggagaccagcttgttcaataaaggaagacctcatctctaacaacaaccacaacagcaaaaaattaaccaggcatggtggcacatgcttatagtcccagctactggtgcagcctcgaactcctgatctcaagctatcttcccacctcagcctcatgttgtagtgaactttgttatgcagtgtctcctattctacatgtgcaggagtatttttactgtatgtacctggagtggaattgcttggtcattgggcatgtgtgtgttcagctctattgagtggcatcataccgttctccaaagcagttgtaccaatctacaccctcaccagcagtgaatagtcttcccattgttcttcctcaatgaaactagatattcacagccttttaggtttttcctagagtatgaagtggcatctctttggggttttaatgtttatttccctgattagaattgtagttgagcatcttttattatgtttatggaccatttatgttttctcttctgtgaaattcctattcgggttttttgctcattttaaatgttgttgtttgtgtttttcttatataggaactcttcacgcattcaagatgcacatatgttgttcagaatagtacctgagacatagaaacaactttgtaagaatagctatcattatattaccattgtatttaatcctttgtttttatgtgttacaattatcttctgctagtttgtggcttatttttcattctgtgatgctaattttttaacctagtattctattattttaaaaatacacaatcttgagtagtctacatgttcataaccatgacatattcatgttgcatgtgttctgtgtcataacccagaactttcctttttttttttttgagatggagttttgcttttgtcacccaggctgcagcaatggcgtgatcttggctcactgcaaactctacctcctgggttcaagagattctcctgcctcagcctcctgagtaactgggattacaggcacctgccaccatgcccagctaatttttgtatttttagtaatgacgttgtttcaccatgttggccaggctggtctcgaaatcctgacctcaggttatccgcccaccttggcctcccaaaatgttgagattacaggcatgagcagctgcacatggccaactttcagtcttaagtaccattttttgctgctgtttctttttttgaaccccaggaaaaaattaactcatttaatcccctattcaaactgctacaattttattttcagtgttgtcgcctggttgtagatgcatttgtctctccaaatgcactgtgattatttccaagacaaaacatgtttggcattgtgatatatatatatatatatatatatatatatatatatatatatgtatatatatatgtatatatatgtatataatatatattgtataaatatttatattttataattttatatatcatataaaaattatatataaaaattatatatatatatataaatgccacttatccctaatatagggactcgattagtttctgctagtgtggggacaagtcttatcatggctaggggccacgatggtaggagcagtcagaggatttcttgcattgtgatgagtgcatataagttaaatgagccacttatcagtagatttgatagcaggataacagttatatcactgatacctaggcagtacatgacactcgctaaagaatagattaatcctcatgctcttcatcttcctcctaatctctttacctgtgcttccctccagctttcaaagtgctctgagtcatcacttacacagtgttccttagctgccccttcagtgggccagtgtttctgtgccccagtgttcctgagagttagaacacagaaaacagagcaggctcttgcccacatcacagaacatctttgtctacctgtggatcccgcacatttgttcattagagttcaggaattgccagagactggcttttctggcaatggacactagattcttcagaagaatattggttgaaatcttcctgctgtgacagttccctgcatgcagggcaggagtgtgtgcttcttcccagcaaaggcagagtcagggcctacagaaactgtgcccacagcctatagtgatggggtctatgaggtaattcaggcaagtgaggcaggtgagttctttctggaaggcttgtgggaagtctaagtccatttttctgagggaagaaaaccagaagaatttattcttataccatagagagacaaatatctacacaaaatttgaaacaggttttgagtaggatccgctcacaggtttaaatctatagcaggatacgattttattttgcacataacaaaatgaaaaactgaggcacagaattcaagctttgcagaaaaatgtgttggctccctaatcaacactcacacacacacctactttcccaaattctttcctcctgtatgaaaaaacttaaggctgggcacggtggctcatgcttgtaatccagcactttgggaggctgaggcagcaggattgcttgatccaaggagtccaagaccagcctgggcaacatgatgagaccctgtctgtacaaaaagaaaaggaggaaaaaattagctgagcatgccaatactcccagctactagggaggctgaggtgagacgtttgcttgagcccaggaggttaaggcagcagtgagccataatccagccactacactctagcctgaatgacagagcaagactctgtctcaaaaatgaacaaagaaagaaaagaaagagagagagagggagggagggaaggaggaaggaaggaaggaaggaaggaagaaaaggaaggaaggaagtttacagagttttttgaggtgttagtgttccctaaattgtatggtcttcagagtttactctcctatagcttcaaggggtgagtcctgactggtaggaaaatcaatcacactcttacttgccagtgattcatttagggaagacagctaactaagctcttccattttgattatttcatttaattgtaacaaccatcttatcatgacttcttcaaaattaccctgccagtaagtgctggaggactccccagaagcagaaaccaccatgcttccagtatagcctacggaaccattagccaactaaaggtatttctcaggtatttctttatatcttcagccaaaattaaagagttaggctttactctccaagatactgcaacagacaaaaacaaggcaccactgttttctaatgttgttttcttgttaattcaatcaacaagtattttctggtaagtttactgttccagagactgttaacctggtgatgcaccggttaataaaacatccttaagagaaataaaagtttaaaaataagccagatgataaaatgcagtagtgtacacaatgccacttatccgcatgtcttctctctgtcacccatgatccagaaaatttctttagtataagccattgataaagatgcctgaaaaattcatgtatagaagacatagtcacgaaattatttttttcctttgatatcccttgttacctcaaacagaatttaccactccaatttgatttctgaatacatgggagttaatagaatactcctaatccatttataggatctacactaagtaaaaaaattaaagacatctgaaaactattttgtaagtccttataatccatatcaacaattatggaatatattaagtaatagaccaaaaattaatcatcatattaaccaaaaacacatagcaagacaagataactaaatattttcatttggaaattgggaaatttagtcaattttaaaactcagcaaatgagatcatttcacagaagcaacctaggtttgctggtaaattaaaattatgacattttgttttggtttgggagggtagttcctcttctgtaaattgtgtactcacataagaaatatatctatgttctcacagacacttgctgtagaggtaataatatgaagttagctcagggatcagggcctcacagtgcagtgctggtagttttttttttttttttttttttttttttttgccctgcaccttgagtaaaagtttcctgaggcctccccggaagcagaaaccactatgcttcctgtatagcctatggaacggtgagccaactaaaggtatttctcatgtatttctttatagcaatgcaagaacatactaatacagctaagcagaggctatcaggaccagcaacagtctgagctggatgagagacaaagctaaactttgagcagcagcaggagctgccagggagacagaaaggaaggacagactcctaaattccaggatgtctcctttaagtctgtaagaagctcagccaccgtctccttacctgactcctctgggaaagagtttccctaggttaagccatacagggatagggtaggagatgccatttggatctaggagcagagggcagagactcagcaggaagagtgtctctttgagaaggagacacagtggagtaggtgtgtaggttcacagggccagctatgggtagagtcgggtgtacatttttagaagccacaattcccaaaaatctcctgactataacatcagtgcacagagccagtgaaatggaggaggagtgggtccaggcaattcaggaagaaggaaagtaacaaatgagtggttgcaggaggacactttttctgtcgaggtcactaaacaaaacattgtctcctccccttaacttcggaaacaagcaatggagggtaaaagtgttgcctgggccctgggggcaaagggagtagataacttctctgtcgcgttctccagaagggcccattccagcctcacaggccgagaagtctgttcggttcccaagtactagagatgctgctataagggactcccgaatttccttcctgaaccagaggctgcccagccttttcttcctgttttattttttcccaggaagatacttgcctgtacaattacaaggttctacggttctaaattccaatctagtcttccacatcattttgaaggtatattatttgtcaaagtgggatgatagaagataagtgtggacataaaattaaattgttgacaaggaaaaaaactaaaataagaaaataagagagaaaaaatatatgtatgtacagtggttagctagaaatatgccctttaaatatttggcatgtggtatgtgggcctcaatgtgtactattgcactagcttcccaaatattaaaggatgtcttttaaaagaaaaacctcttgctaaaaggttaacagttaaaataaccagagtggcacaggtaccagtcattaagtgaaacctttcatcttcccagaatagtacctgttcccaagccagcttcgttgaaaatcacttttctctcctttactatttagtttacagattgtatagtaacaatacagaaaccacaatagtagcaaaaagataaagaatatttttaaatgaaaactcacatcctaactctaccaaaacatgaaaattaaacctgaatgcctcccattcctgatatatttttcacctaaatattcagctctgggattgcattgtttttggattgagtgcaaattattgcctggtcttgaaatcttccataatgtgcgtgtgtgtgtgggtgtgtgcgtgtgtgcgtgtgtgtgtgtgtatgtatgtgtgtgtggtgaatatatttctttttgttcagagcaaacattttttcaatatgtatatttattttaggcagattatgctagtaattttctacaaatgtgctttttaaaaaataacctttaatttaaaaaaaatattcttactcagtggcccacaattgttaaaaacgctactaatggagctgggtatggtgacatacacctgtcatcccagctacttgggagactgaggcaggggtattgcttaaacttgggaatgtgaaaccagcctgggcaacatagtgagatcccaatctcaaaaatcaatcaatcattaaaaaataaaataaaacactactaatagctttttaaaaaatagttcttaaccaattttcctaacaccttcctttcctcactgaagtatagaaatatgtggtcaggcactgtggctcacacctataatcccaataatttgggaagccaaggcatgagggtcagttgattccaggagttcaatactagccagggtgacataaggatacttggtctctaacaaaaatttttttgttctttaattaccagggcatgatggtgcatgcttgtagcccagctacttggaagactgaggtaagagaatcacttgagcccaggaggtcaaggctgcagtgagccatggttgcaccactgcacttcatacctgggtgacagagtgagacacagtatcaaaaacaaacaaacaacaacaaaaagtatttgttttagaaaaaacatttggtgaggttggggcttaaaaatatattattctaaaatattcataaatattctctagtaatgataagattaaagtgacaaagacaaacattttcctgtgcagttccatctctcaccttcccgtaatttgtctgtcccatccagcttccaaaggaaattatttacaaaataatgtctgcatcctgggtctatatatctattgcctatgaggagaacgtttaagatctgagccatcttcaagtcttatactttgtgtatagctctcatgtttttgcaggttaagtaagtttgtataccctttcttttattaatctgtgtatggtcagttcatttcgggtaatcttcagagggtgaaaggggaagcttttcacttcactcctactgtgacaactaactaccttcttacttattcaattttttagtctatatcaacactttcatatacatttacttttaaacaaaattttccatcattacacttaaaatttatttaccttttaaaaaggaaattaaaaataaaattaaaaattataaaattttacataataaaaataaaataaatgatttatataaaaattaatctgacctgtgaaaaacactatccagaggccaggcgcggtggttaacgcttctaatcccagcactttgggaggccgaggtgggtggatcacgaggtcaggcgatctagaccacgatgaaacccctctctaccaaaaatacaaaaaattagccgggtgtagtggcgggctcctgtagtcccagccactcaaagaggctgaggcaggagaatggcgtgaacccgggaggcggagcttgcagtgagccgagatcgtgccactgcaatccagcctgggtgacagagccagactctgtcaaaaaaaaaaaaaaaaaagaaaaagaaaaacactatcgagagaataaaaagacatatcacagactgggagtaaaaatttacaaaagctatatctggtgaagatacatttgttatccaaaatatacaaataactctcaggactcaataataggaaaacaaatagtctaacacaaatgtagagatctgaacagacatttcaccatagaatacagatggatgatacgtaagaacattgaaagatgttcaacgtcattcatcattagggaaatgtaaattaaaaccacaatgagatactgctacatgcctattagaatagataaaatttaaaagactgaccatactaaacattggtgagaacacaaaggaacaggaatgctcatacactgctgctgcaaatacagcaactttgtcagtttctttaaaagttaaactggccgggagtggtggctcatgcctgtaatcccagcactttgggaggccaaggcgggtggatcacgaggtcgggaaatcgagaccatcctagctaacacggtgaaaccccgtatctactaaaaatacaaaaaattagccaggcgtggtggcgagcgcctgtaatcccagctactctggaggctgaggcaggagaatggcgtgaacccgggaggcagagctttcaatgagcctccatgcaccactgcactccagcctgggcgacagagcgagactctgtctcaaaaaaaaaaaaaaagttaaacatatcacaccacttagtcattcaaatcctgcttatttgcccaagacaaatgaaagcgtatgtccaaatgattggacaaacattcgtagcaactttatttgaaatagcaaaaacaactggaagcaaaccaaatgtccatcaagaggtgagtagatacactaactgtagaatacccatacaataacacttttttttaaactaaggggcaaaaaacaaaaaaaccaaagatagaatctaatttcttggtaaatacattcactattagggtttttataacagagaagtcattctttattaacactcttttgactattaaaatattttgacatcaaaaatctgcaaaatatgaagaaacaagggacacacagctttttctattttctatttttattttatttttatttttttgagaaggagtctctttctgtcacacaggctagagtgcagtggtgcgatcttagctcacttcaagctgtgcctcccagttcacgccattctcctgcctcagtctcccgagtagctgggactacaggcacccgccaccaagcccagctaattttttgtatttttagtagagacggggtttcaccgttagccaggatggtctcaatccctgacctcgtgatctgcccgcctcggcctctcaaagtgctgggattacaggtgtgagccaccgcccccggccccaggacacacagctttaaaatttctccttggtctcacccagtgccaaccacctaaaacctctcattttcccccagacatttcttctgcctccaggatggaggtagagaatcttggccttgggccacgcactggggaccatgctaggctgccgtggtcagtgacagactcaggttctcaccagcatccccaaaataggcccctgaaaaaaaatgttaccatcagggtgcgctccctgattcttgtgtctgctggaaggaggaaatcaagccaggaacgttgtcaggatagagatgaaaatggggctcacttttctgtctcttgtgatgtcagacaagcctttcagctctgtctcctcagccctcatggaatcgtttggtgtggacgcaccgatattctgaactgggtctcctttccctctgcccttctctggagccagattctgagctctccattccaatttttcccccaatttgcccttgcgtttatttatctggattactgtctgcctgtcccaaagaataaaagctttatcacagtgggaactttgtttaaaaaaataataataacagctatatttttaggatccatgacactgtccagcatatcggtggtatctgataaaaaatgtttgttgactgaataaacaaatatattattcacaattcacattatcctgaactggctagaaaattaaatatctgatatcagtattggcagcattatgaagtaaatataattctgacacagtgctcgtgaaagtctaatatgaaatgctcattttagaaaacattttcttgtagatttgaaaatgtttcatctccatgaactagttgtatatctgcaagttgcgtttctttgggttaggcagaaaaattgccccccaccaaagacagccacatcccagtcttcagataaggtgaacatactaacgtaagttagcatgttcaaagggacttggcagatgtgattaccattaagggtattgaaatggggaaattaccttgaattaccttggtgagtccaatctaatctcataattccttgagagcagagaatattttctggatgctgagattcagacagatggcagtatgagaaagatgtggcctgctattactggcttttaaaacagtggtagggggccacaagccaaggaaagccagtgacctttagaagctgggaatgacccaaagttttcaaccaggaagaaactgaggatctacaaccacaaggaactgaattctgccaacaacccagatgctcttttagagccttcagaaagaaatgccgcctgccaacatcttgatgttagttcagtgagagccatgccagatttccaaccaaaacaattctaagacaataagtttatgtgtgttttttaaaactgactcaaatcttacaaaaatgtgtacctttaagccactgaatttgtggtaaattattacagcaggaatagaaaactgatacaaccctagagaaagtcttgtacatgtgctctataaacacacagcagaatttttttaactttttattgagttaaaaaaatatatataatttaccatctgtacatttttagaggacagtttagtggtgataaatacatttatattttcttctcttaatctcctcttccaactccccttgctggcctctagcaaccaccaatttactttctatcttcatgagattcacttttttactgcccacatatgagtgacaacatgtgatatttgcctttctgtgcttggctcattccacttaacataatggcctatgttcattacgttaagccaaatggccagcgccacctatgttgctgcgaatgacaaaatttcattcttctttgtatctgactagtattccattatgtatatatatgacttttaaaatctattcatttgttgatgagcacttatgttgattccatattttgtctattgtgaatagtgctgcagtacacatcggcatgtagatatgtctttgacacattaatttcctttattttggatatatatccagtaaagaaattgctgggccacatggtagttctatttttacttttttgaggaacctccatactgttctccatagtggctttattaatgtagattcccactaacagtgtactagtatttccctttctccacatccttgccagcatctgttattgcctgtctttttgaaacaagtcatttcaaccaaggtgagatgatattgcgttgtgattttgatttgcatttctttgacgattagtgatattgaacattttttcatcttcctattggccatttgtatgtcttcttttgagaaaatatctgttcagatctttagcccatttttaaattgtatttatttatatatttttaactattatttttttagaagcaaggtcttgctttgtcacccaagctaaagggcagtagcataatcatagctcactgtaacctcaaactcctgggattaagaaatcctcctgaccgggcgcggtggctcacgcctgtattcccagcactttgggaggctgaggcgtacagatcacgaggtcaggagatcaggaccatcctggctaacacgatgaaaccccgtctctactaaaaatacaagaaattagccgggcttggtgccgggcgcctgtagtcccagctactcaggaggctgaggcaggagaatggcgtgaacccctggggagcagagtctgcagtgagccgagatcgcgccactgcactccagcctggacgacagcgagactccatctcaaaaaaaaaaaaaaaaagaaaagaaatcctcctacctcagcctcttcagtagcccatttttcaatcagattttttgtttattattgagttgtttgagctccttatatattctacttgttaatcctttatcagatagatagtttgaaaatattttgtcccagtctgtggttggctcttcgctttgttgattgattcctttgcttgaggctttttagtttgatataatcccgttgtctatttttgcttctgttgcctgtgcttccgaggtcttacgcaaaaaaatctttgcccagactaatgtcctggagcatttctcctatgctttcttttttcttttttttttttttttttcacacctttctcctgcctcagcctcccgagtagctgggactacaggcgcccaccatcatgccccgctaattttttttttttttttttgtatttttagtagagacggagtttcaccgtgttagccagggtggtctcgatctcctgacctcgtgatccgcctgcctcggccccccaaagtgctgggaatacaggcgtgagccactgcgcctggcctttcctctgctttttttttttttttttactagcttcatagtttgaggtctcagattcaagtctttaatccatttttatttgatttgatttttgtgtatggtaagatgggtttaattttatccttctgcatacagttattcagttttcccaggatcatttattgaaaagactgttgttttcccagtgtatgttcttgatgcctttgtcagagatgagttgtgtgtaaatgtgtacatttgtctgcagtctctattctgttccactgtcctatgtgtctgtttttacgccagtagaaatatattggcaataattagtacagaaaagctgaaacaatgaaatgacaaaagtgatttatactgatataattccttattctcactaaatgcaatagcatacagctaggaaaacaatgtagtgcacacggtattaaaatagaacacaattcaatatacacagtgctcacagtggccatcgttagagtgttgacggggatgcagtcagcaaaagttgtacaggtgacttcaaaagtaatcataagcacttatgattacttttggcttaatttcttaaaccaagactggagacacaggtgttcattatgtgcttattatacatatacaataaatattttataaatatattgtttctattcagtatttaataaagtaaatcaatagaaaaggttaaaaatcaatgcacacatatttcaaatattttttgctccaagttatataaacattgcatagttattgccctgggcctgccaagttgactcacacctctcatcctagcactttaggagactgaggcaggaggatagcttcagccccagaagtaaaggctgcagtgagccttaattgcactactgccctccagcctaggtgacagagcaagatgctgtctgaagataaaaataaaaataagttgataaataaatatatgtttatatattaactgattttattaactatatatatgtgtatatatatatatatatatatatatatatatatatatatatatatatatagttgttttcttagtctataggcaatcttacagtgcttaagactttgatactgagaacagatctcctaggtatatgctgtgtttctggggtgacatgatgctctcatctggcctccgtgagcctaattctatcttacatttaccccactcttcaacaacaacttggggaggtttccctaaacattcctaggtgaacccaaacctatggccctcaacacatttctaggtaaagcaagctcctgacatatctgtggatatcctctcattggaagaagggggaagagaccatctcaaaataattcatttaatatagcttttcagcattaattttattttgagaaagagacacacagtaaataaaatttctaaaaaactataaactttcaagcattctcatgctaaatctagccctgctcacatgccagggaaataaaaatgtaatctgtttctcaacctgaccaggatgctacagtaattaaaaataaactcaatccctggatccctaccaaagggtcatttcatatggatcaaagttctggtaaaattatttgtctggaaatagactaattctccaaaatataattgaaatagcctctggaaagggccaaatacgactcttaatgatacaacaggaaaatataggtctgatgttcattccgtgtggacaacaatagcagccattcccacaaatgtctcatttgtgggaagtaaacactacttttgcagaatcttacatgatttcagtagaagggcaaggacatttcagttgggaacagattgctccatggtaatgtgatcactatgtacccaacaatggctctttcttcctaacgtcaatgcagatgttattttcaccttaactattatcattgctgtttctaaccacataaaagtgtatcctttatatatctgaagtaaattcatactagtggtgtaacatctccagccatttaagtgtaaaaacagaaaacgtatgatgtgttgacttactgttttatactcctaacgcatgaagagaagatccttttattcattgcctatacttttatttctaaactttctgtaacactttatcttatatccagcatagaactgagatttgctttttgatttaatctgacaatatttttcctctaataagagtcaagcccacttacttttaatgataaattgtgtttgtttatattttgatagccgtatattatgctatgatttagatgcacatatctgtcttttgctgtcttgtttgtttttattgcttttgttttgatgttgtgatatttggaagagttaaacttttattctgatggctaccttatgtaatttcataaaatcatctctttctttagacagtagcgaatgtctctaaactaagaacaatgatattagctgtattctctttcttgtcctccctatgtgatttttcatcccacaatttgatttaatcatattaactttgtttcccctggtgccattaagtatgcttacatttctataaacaatatcctttgactcccaggcattacagatgagcagtcagtaaaatcattctgaggaatactttctctttccttttcttccatttttcttagttgtatcatttctatattgccagagcacctatagttgcatttctttctgtcagctttatccagcatttgtttttgtcttttatttgaagttaaatatattccttgctcactacaacactgggggaaggaaggtttctgttgtcattgttgtgcttgtacagttgtttatttaaaaacattggtgaaaataaaaactgtatgtagatggagtggagataagacagcaaatgagagagactgatgatgagtgtgcctattctagactgggaggcgtgctacactgagtagtgtctcaaggccacaggaaaggatggttgattgtgagcaggtggcctttccactggaggagagaagtcctgcgctcaacaacctgtgcagaaccagaaactggtaatgcttcaaatcaacttacagacctggaggtagaaatttaagaaaactcgtttagcacttagttacctagaaaatattagcaactatttgctgagcatctatcagtctgtctgtagcatggaagacctgagtacaggggaaactggattagtaacagtgggtcagaaaattatataatattcaaccaaaattcctgctttacatacacagcacctggtatttccagaactagaaggtaaagaaattatttgtgcttgaacttgcagaaaagtgccttttcccttcttctcttgcatcttaacctggagcttcccttttcttgagcctcagtgtgcttcccaactcaatttatagttgacttcctgcagtttctctttaggacagggctttgttttgggggtggttaatttgtagggttcataggaaacagaccactcacagcacctgctttttggcatcctcactctcagctatgagttgaggcccaggaagccttctgccagcctcagctgccgttctcagattaatctgctgagttcttttcgcctagtaagaatctctgaatttaggaacatagatgttagcgcttgtatttctaggttttccagttcccagggccattaaacatttttttctttcctttccttcttccaaaaaaattggtgatttgcctgggtccctgtggtttaacctcacaaaaggtccatgatgacaccctgttacattgttttgtcatagttaataccttgttatcccagttgctcagtcagttttgtgagagattcagggatattaataaaactgtgctgctgcttctactaacaccttgcataaaaaccctattaattaaaatgtttattttgcatgtgatttgaacttgtaatttttattcaaagtttttcaacagagatccagaaaagaccctcattatatttttagttttgtgcattgcaacactttttagtgaaaaaaaaaatacatgagaacaacacaagtgattttaaaagaataaacctacaatccattaattataaaatgaaatactatgcaggtgttaagaatgagggaatcaataagaacttgtgtggggtaactataaactttaaaaaaaaaattaatgctcatgtgaccatattatcgttaaaaaaatacaagcatacttgcacacaccttcaagcaaaatgggtacacgcatttaaaaatatttaaattaagtaaatggcccaataatttaactttgtataattctatgttctctgattattttatgtgctagaaacaggcattactgttgtgtttatttcatttgaaataattgtagtcacatgaggtttaagttataatacagagaggtcacatatgcctattttctaattggataccttatttattactgttgagttttgagaattttttacatatgctagatgtaagttctttgtcagatatatggtatgcaaattatttctcccagtctgtaattcattttttcaacctctttacagggtctaagtaaaaaaaaaaaaaaaaagtgtttatttattttaatgaagtccagttttatcactttttccttctgtagattttgttttcaacatcaagcctaaaaattctttgcctagcccaaggtctcaagagttttcttctattttaaaaagtttaatgaatttatttatttattaattatttttgagacgaggtttcaccaaagctgtagtgcagtggtgtcatcattgctcactgcagccactaacagctggattgaagtgatccttccacctcagccacttgagtagtagctgggattacaggcatgagctaccatacacaactttaagttttataatattgcattttacatttaagcctgtgatttatgtgagctaaattttatataaagtataaatttaggtcagtcttagtttttgtacctgtgaatgtccaattgctctagcaccatttgttgaaaaagatatccttcctttaaactgattttgcatccttgtaaaaaaaaaatcagttgaatatagtgtggtctgtcaccttttaataagataaaaacattggcactcaccagatatcgaagtttagaaatttttttaaagctaaacttctgaagatagaataaaaacaccttcacatgtcaaattagtcaatttgtataggactaattcatttaaatatattaaaatacaaaataattcaaaccactaaagtgataatacaagactataaatttaaaggctaattattaagtcaaattgctgtattctacttgttagagtgagttcaaaagatccattgtattactgaataggcaaaagttttaatttcagaggatgaaactgatatattactgccaccttgtggatattctgttattacaggctattataaaaagcaatgagggtatgtaatctgttctaacaagaagcgtttccttttttttgtcgtttttattattgttattattacgttttaagttctgagatacatgtacagaacgtggaggtttgttacgtaggtatacacatgccatggtggtttactgcacccatcaacccatcatctacattaggtatttctcctaatgctatcactccccgagcctcccacccccctgacaggccccggtatgtgatgttcccctccctgtgtccatgtgttctcattgttcaactcaaaagaaaaacagaagcattttctgctttcccaatttcttaaatacaatgcaactttatgtttaatttaactaacttaattttttgagacaaggtctagctctgttgcccaggctggagtggagtggcgtgaatatggttcagtgaaacctccacctccctggctcaagtgatcctccttcttaagcctctcgggtagctaggaccacaggcacgcaccaacatggccagctaatttcttttttattttttatagagatgaggtctcactttgttgtccacgctggtctcaaactcctgggctcaaaggatcctcttgccatggccttccacagcgctgggatttataggtgtgtgccatggcaccaggcctaagcaactgtagagaagcctttttttctttcataaaatctgttgtagatattttccttatggaatttatttgtggtgaaatattttaatagacagtttaatttgttaaataatttgtctcagataataattgattaatattaaaactacaaaacaagtagggtcttctttttctatgaaaaatgaaagttgattctgacatttatgtaaacattttaaatattcaaagtatataaatgtgaagtcctatcaagagtaattagacaagagaaagaaataaagggcattcagatcggaaaggaggacatcaaattgttcctatttgcagatgacatgatcttatatataggaaaaccggaagactctaccagaaaacttttagaacaaacaaattcaatgaagttgcaagacacaaaactaatacacaaagattggttgcatttatatttatgaacaacaaactcgctgaaaaagaaattaagaaggcaaacccatttacaatacttaccaaaaataacccagacataaatgtaaccaaggaggtaaaatgaaaactacaaaacactaatgaaagaaattgaagaggatacaaacaaatcaaacaaatgaaaagacattcacactcatggatcagaaatatgaatgttgttaaagtgacagtactactcaaaagtaacctacagattcaatgcaatctctatcaaaatacctatgaacattcttcacaaaattaaaaaaaaatccaaagagattttatggaatcaaaaaatatcctgaatagccaaagccatcctaagcaaaaagaacaaagctggatgtatcatgctaccagacctcagaatatactacaaaactgtagtaaccaaaacatcatggtattggcataaaaacagacacatagacctatggaatagaataaagaacccagaaaatccacatatctcagccaacggattttttacaaacatgccaagaacactcattggggaaaggatagtctcttcaataaatggtgctggaaaaactggatatccatatgcagaagaatgaaactagacctctgcctctcaccctatacaaaaatcaactcaaagtacctcaaatacccaaatataagacccaaaatggtaaagctactagaagaaaacataggggagatccttcaggacattgctctgggaaaatattttatgaataaggtatcaaaagcacaggcaacaaaagaaaaaataaacaaatgggatcacatcaagctaaaaatcttctgcacagcaaaggaaataataaagtgagtgaaaagacaacctacagaatgggagaaaatataaactcatctggcaggaaattaatatcaagaatatacaaggaattcaaacatatcaacagcaaagaagcacaacaatctaattaaatataaacaaatgctctgaacagacatttctcaaaagaagacatacaaatgaccaacaaatatatgaaaaaatgttcaacaccactaatcagcaaggaaatgctaatcaaagccacagtgaggcatcatcttactccagttaggatggctattatagaagagacaaaaataacaaatgctgacaaagacgtgaagaaaagggaccttttttttgacagaatctcactctctgtccaggctggagtgcagtggtggtgtaatctggctccctctgcttctagggttcaaatagttctcctccctcagcctcctgagtagctggagaaaaaggaactcttatgcactgttggtaggaatgtaaattagtgcagccagtatggagaacagtattgaaacacctcaagcaatcccactactgggaatttatccaaaggaaagaaaagcattatattgcagagacatctacatcccccatgtttattgcaacagtgttctcaatagccaagatatggaatcaacctaggtttccaacaacagaggaatggatttttaaaatatggtatatatacgccacggaatgctatttagccataaaaaagaataaataaaatcctgtcattctcagcaacttggatggaactggagaatattatgttaagcaaaataagccaggaatagaaatttcaacaccacatgttctcactcatgcagaagctaaaaaaaagttgatctcgtagaagtaaaaagtagaacagaggataatgcaggctgaaaagggtagggagaaaggaggaatagtaagagatttgttaatggatacaaaattacagctaggtaggagtaataagttctagcgttctatagtactgtagatgactatagttaacaatactatattatgtagtttaaaatacctaggagtagtttgaatgttcccaacacaaagaaataataaatgtttgagatgatagatatgctaattaccctgatctgatcaccatctacatgtactgaaacatccccatatagccatgaatatgtataatctttgtcaatttaaaaattaaaaaaaaaaatcttggagaatgcatttgaaggacttgtactcaagaaatcaacttaagaacctcggtctccttggaatttgtgttttctagaccagtacttctccaaattaaagcaaatttaggctaggcatggtggcccatgtctataatcttagcactttggaaggccgaggcgggcagatcacttgaggtcaggagttcgagaccagctgacccaacattgtgaaacactgtctctactaaaaatacaaaaattagctgggcatgatggcatgtgcctgtaatcccagctactttggaggccgaggcaagataatcgcttgaactggagaggtggaagttgcagtgagccgagattgcaccactgcgctccagcctgggcaacagagcaagactctgtctcaaaaaaaaaaaaaaaaaagcaaatttagttcactttggtattgtgtcaaaatgttgattcttttaaagtaaatctaaagaatttagatgtagttgaagcttgtcatctgttcttaatttttttaataaaaatataatattttgattcagagtaaatctaaagtgagatctgaagctgctcccaggtgatactgatgctgcttatttttgcccagattttgagtcacaaggttctaaattattggtttgaagtcctacatgagtaatcacttggggagctcaattaacacccagcaacagactaattattaataaaccagaatcttcagtattaggcttcaatcattggcaattttttttttttttgacacacagtctcccactgtcgcccaggctgaagtcctgaggccagaatgagactaggacatggttcctttgtctaagtaaagtgaggcagacaatggaatacttcagacttcaaattagtatggtaagtgctatgaagagtatgattagagttcattacttacccagaaaagggtcactcagcccagcctgggagttagagaaggtttcctgaagtcttgacatgtgagtcatgaaaggacataaggagttaaacacgtgacaaaataagctaagagaattctcaacaaaagacaaaatattgccaaaggcttttaggcatatactatcttagtattattgggagaatgtaatgactttctgtatttcaaaagtgtaaaatacaaagtgggccatggtatgagataaaccagtaaatatgttctgggaacatatcatagaagggcgtgtatgctgtcctaaggagcttaaacttcaacttcagttcatgggagccaatgacaagatctgagcaggggaaggatgtggctagaggggcattttagacagacaagatcgtctgtggattacacctaggctaagcaacgggttaaagttgttgtcttaagacaatagtccaggtaaaagataataaagttttaaattaggatgttagtaggaatgaggaagagggatggatttcagaaatagtaaggaaatgtattagcaggacttgattagtgattgacttggggaaggaggggaagatagagttcaggatgactccgagactgtctggtgtcggtgactaatgactgaagctattaatagaggtaggtaatgcagaccaaaagcaggcccggggtgagagatgataaatttgaattttaacatgttgagtttggacatccaggatgaaataaccacaaaacatttaaatatacgaatctgaaaaggtaagcatcataagcatatgagctattggtaaaattctgatacttaatgaagtctcgcagggaggcagtacagaggcaagcaatgggctggggataaaacatagggaaatattatttaaataaagatgaaagaaaaggagcccacaaacgaagctgaaaaggcatagtcaaaaaaagaggattgccaaagtgccacctttgaagctctgctgttacactttataaggaaacttttggttacctgggattgcatgcatttataaaagtttctattattaggaagacaataataatgataaggccctttctcattgttgtcagtgtaatttatctatttaattatagaacctagttccaggatgcttaatctgaagtatatacttggggcaaaatgaattatatcttaataataatctggaattattctctctaacttgacatatttttaattcttgctagattttcaaaacgtcatacctcgaaccaccaccagatggctctgagaatgttacaaatattgtgccaccatataatgctttctcagcccaaggcatgccagaggtaaaataaaatgcatttgtaacccaagtctttaaatggttcttttgctatataaaacctgtatagaggactaaaaccaaggaaattaggtgaatcattcatgcggattcattgtttgatattcagtactatgaaaacctcatccctcaaatttaaaaaattataataaaatagaaaagaacaccagacagagaaaaaagaaacaaaacaaacacattaaaaactgaccctgctgaagcagatgccactctttgaaataacaaagaaactgctgaacacgcctttaattcagtgaggcaatggtgtttttttgtttgtttgtttttgtttcgttttgtttttttgagacggagtttcgctcttgtcacccaggctggagtgtagtggcacaatctgggctcactgcaacctccgcctcccaggtccaagcaattatcttgcctcagcctcctgagtagctgggatcacaggtgcacaccaccacaccctgctaattttgtattttttttagtggaggcggggtttctctatgttggtcaggctagtctcgaactcccaacctcaggtgatcggctcacctcggcctcccaaagtgctgggattacaggcgtgagccaccacgttataaagggaaacttcctatttgccctctaaaggtttgcagaaaatgaatggacaaaacataaattaatagaagaaagaggcaaaacaaaaattctgtaaaatgtaggggaaaaatcacagggtctctctgttacccagcatgaaatgcagtggtgtgatcatggctcattgcaaccttgaattctgaagcacaagtgattctcccccctaagcctatggagtagctgggatcacaggggcatgccaccatgcacacatacatggttatttgctggagaggagatggagactctctgtcctggatgtgagacagttggctggcatctgggtaaggatgacattccctcattgctaaagagtaaaagaggaaagtgtcatggatagtgcaagcagggacatgccctgacctagtgaggtccagaggcttatattgtccttcataggggagtgggaagaagcgagtgtaggcaacccaggggaaataaatgacctaaaataaaagaaatagatcatcagaagtgtagatgtattagtcagggttctctagagtgacagaattaaaggactatatacatatatatatatgaaagggagtgacatggttaataatgagtgtcaacttgataggattgagggatatgaagtattgatccagggtgtgtctgtgagagtgttgccgaaagagattaacatttgagtcagtgggctggggaaggcagaccgacccttaatctggtgggcacaatctaatctgctgccagcaaatataaagcaggcagaaaaatttgaaaaggagagactggcgtagcctcccagcctacatctttctcccatgctggtttcttcctgccctcaaacattggactccatggctctcctttctcatcagtttgcagacagcccattgtgtaacttatgatcctgtaagttaataaactcctctttataaataaatatatatatgtgtgtgtgtgtgtgtgtgcatatatatatgtatgtgtgtgtgtgtgtatatatatatgtatatatcctgttagttctgtccctctagatgtcactgtctaatacaggaagtttattaagtattaactcacacaatcaccaagtctcacaataggccatctgctggatgaggagcaaaaagagccagccagagttccaaaactgaagaacttggagtccatgttcgaaggcaagaagcatccagcatgggagaaagatgtaggctgggaggcgaggcccgtctcttttcacatttttctgcctgcttatagtatggctgggttggcagttgattggattgtgtccacacagattaagggtgggtctgcctttcccagaccactgactcacatgttaatctttttttggcaacaccctcacagacacacccaggatgaatactttacatccttcaatccaatcaagttgacactcattattaaccatcacaagcccaccccttgtgaacttgaacccacacacatctcctgagatcatacataatcttaaaatacagacaatagttaggtcataattaccccaacataataaactatccttcctacaactggaaatgcaccaatccccaacccaaatactattacataaagtaaacaatacttaaatgctgatatgaggtgagcaaatctatgtcacctgataaagaaaagggaaatgaaatgaagatattttcttagtacaagtgcatacatgcacaaacatgtttttaacaaaagaagaaggaaatactcatgatagttccagtcctcatttctgcagctggtcaggtggtcgtagctggtattgataactactttcttccactattcattctgtattccctttgccttcagcaagcagctcagcaggtcgtgacccggagaggatctggaccatttgtagtcctacctggatttggtatagtttcccatttaccttaatcagagtgcatgataataccaagagatgccctaatggatctcctatattccatgcatactcttcctcacttccgttgtggagtagcggactgacttcatcttgatagtctgggtcaatcactgccgccaacactgtaactccattattagcttgttgacttaaaggtaggaggaccccaaagcatccaagtggccatcttaacttccagtttaatggaatccttattgagtctcctggtagcaacgttcttccctctggagctaagatgactagtaaagcagaacctaatgtcgtgggaacagaaagcaaacattttgctagtgcatcatagtgagtggttccactttcatatccaccccttgaatcctggatctgtgaatactggctatgggagaaacaataccatacattgggcgctgattcagagcacacatggtcttctggagtatggtgccccggcccggccaagtattgtaacctagttgacgttgtaatcgcgacctcaaaaggccgtcccaccattctatcaatccagctgcttcaggaagatggggaatatggtaagaccagtgaattccgtgaacgtgagcccattgcctcacttcttcacctgtaaagtgagtgcttggtcagaggtaatgctgtgtggaataccgtgatagtggataaggcattccttgagtccataaatggtagtcttggcagaagcattgcatgcaggtaggtaaactcatatccggagtaagtgcctgttacaatgaggacaaacctctctcctttccatggtggaagaggtccaatataatcaacctgtcaccgggtagctggtcgatcaccccagggaatgatgccatacaaagggttcactgttagtctctgctgctgctggcaaattgagcactcagcagtggccacagacagttcagccttggtgagtggaagtccacattgctgaatccatgcatagcctccatccctgacaccatggccactatgttcatgggctcattggacaatgacaggggtgtctgaggaaagaggctgagtggtatccacagaacgggtcatcttatccacttgattatcaaaatcctcctctgctgaagtcacttgttggtcaacactcacacagggtacaaatatcttcagtttttgaccactcagagaggtccatctacatactctttctccaagtttctttgtcaccaattttccaatcatgcttcttccaagtccctgaccatccagccaaaccattggctacagcccatgaatcagtatataaccgcacatctggaaatttctccttccatgcaaagtgcacaatcaggtgcactgctcaatgttctgcccactgggaagattgtccttcaccactctccttcagggatgtcctagaaaggggctgtagtgcttcagctgtccacttttgggcggtacctgcctattgtggagaaccatctgtgaaccaggccctagtcctcccttcctgtgttaactgctcaaaggcaagtccccatgaggtcatcagtgcaggccgtgggagagaaggcagggtggcagggtgggcatttgagccacttcctcatgtaacttacttgtaccccccaggacctgcttgagcccaatcacttatacaccatttccatttgatgatgcaatgctgctgtgcatgacccactttatggctacatgagtcagaaagcacccagttcacgataggcagttcaggtcgcatggtgacttgttgactcatagtcaaatattcagtttccacaaaagcccagtataggacaagagctgtctctcaaaaggagagtagttaactggagaagatgaccaggccttgctgcaaaatattagaggcctccaccatgattcacctatggaggcctgccaaagcctcaaagcagcattcctatctgccatggacacctcagggggacccagcctccccttcattcaagaggttctgggtctgtaaactggctcaaggctggaaattgattgaggggccatgaatctctgtttttataattccaattagtcttttatctgtttgaccttaagtttcctccttacataaattaagtaggaatgcattagtcttcctgtcagtttcacttctaggaacactgtgattagttagccaatgccagagctctacatgagtcagactgttcagattgctgctttgtcttttctgcccattacggtagctacacccaccgtgcctttgagggttgagtgctaccacttggcccctgccacttcaggatccaattattccaaattgtatttaacttttgtaactgagtgactgcagttctcaccattagaactgacatacagagaagagcctttacagggctcttcaaagatgcaggtgctgtcctcacaaatctattttgcaaggtgtttgtcaagggtattaggtacagagtcactaaactccttgcctctcacgagcgatgattcattagtgtcgaatgaatttgttttgcatagctctttaaacctttcatgccaagaactgtcaatgttctctacactattaaaagtagagtccttagcattttgggatcnnnnnnnnnnnnnnnnnnnnnnnnnnnnnnnnnnnnnnnnnnnnnnnnnnnnnnnnnnnnnnnnnnnnnnnnnnnnnnnnnnnnnnnnnnnnnnnnnnnnnnnnnnnnnnnnnnnnnnnnnnnnnnnnnnnnnnnnnnnnnnnnnnnnnnnnnnnnnnnnnnnnnnnnnnnnnnnnnnnnnnnnnnnnnnnnnnnnnnnnnnnnnnnnnnnnnnnnnnnnnnnnnnnnnnnnnnnnnnnnnnnnnnnnnnnnnnnnnnnnnnnnnnnnnnnnnnnnnnnnnnnnnnnnnnnnnnnnnnnnnnnnnnnnnnnnnnnnnnnnnnnnnnnnnnnnnnnnnnnnnnnnnnnnnnnnnnnnnnnnnnnnnnnnnnnnnnnnnnnnnnnnnnnnnnnnnnnnnnnnnnnnnnnnnnnnnnnnnnnnnnnnnnnnnnnnnnnnnnnnnnnnnnnnnnnnnnnnnnnnnnnnnnnnnnnnnnnnnnnnnnnnnnnnnnnnnnnnnnnnnnnnnnnnnnnnnnnnnnnnnnnnnnnnnnnnnnnnnnnnnnnnnnnnnnnnnnnnnnnnnnnnnnnnnnnnnnnnnnnnnnnnnnnnnnnnnnnnnnnnnnnnnnnnnnnnnnnnnnnnnnnnnnnnnnnnnnnnnnnnnnnnnnnnnnnnnnnnnnnnnnnnnnnnnnnnnnnnnnnnnnnnnnnnnnnnnnnnnnnnnnnnnnnnnnnnnnnnnnnnnnnnnnnnnnnnnnnnnnnnnnnnnnnnnnnnnnnnnnnnnnnnnnnnnnnnnnnnnnnnnnnnnnnnnnnnnnnnnnnnnnnnnnnnnnnnnnnnnnnnnnnnnnnnnnnnnnnnnnnnnnnnnnnnnnnnnnnnnnnnnnnnnnnnnnnnnnnnnnnnnnnnnnnnnnnnnnnnnnnnnnnnnnnnnnnnnnnnnnnnnnnnnnnnnnnnnnnnnnnnnnnnnnnnnnnnnnnnnnnnnnnnnnnnnnnnnnnnnnnnnnnnnnnnnnnnnnnnnnnnnnnnnnnnnnnnnnnnnnnnnnnnnnnnnnnnnnnnnnnnnnnnnnnnnnnnnnnnnnnnnnnnnnnnnnnnnnnnnnnnnnnnnnnnnnnnnnnnnnnnnnnnnnnnnnnnnnnnnnnnnnnnnnnnnnnnnnnnnnnnnnnnnnnnnnnnnnnnnnnnnnnnnnnnnnnnnnnnnnnnnnnnnnnnnnnnnnnnnnnnnnnnnnnnnnnnnnnnnnnnnnnnnnnnnnnnnnnnnnnnnnnnnnnnnnnnnnnnnnnnnnnnnnnnnnnnnnnnnnnnnnnnnnnnnnnnnnnnnnnnnnnnnnnnnnnnnnnnnnnnnnnnnnnnnnnnnnnnnnnnnnnnnnnnnnnnnnnnnnnnnnnnnnnnnnnnnnnnnnnnnnnnnnnnnnnnnnnnnnnnnnnnnnnnnnnnnnnnnnnnnnnnnnnnnnnnnnnnnnnnnnnnnnnnnnnnnnnnnnnnnnnnnnnnnnnnnnnnnnnnnnnnnnnnnnnnnnnnnnnnnnnnnnnnnnnnnnnnnnnnnnnnnnnnnnnnnnnnnnnnnnnnnnnnnnnnnnnnnnnnnnnnnnnnnnnnnnnnnnnnnnnnnnnnnnnnnnnnnnnnnnnnnnnnnnnnnnnnnnnnnnnnnnnnnnnnnnnnnnnnnnnnnnnnnnnnnnnnnnnnnnnnnnnnnnnnnnnnnnnnnnnnnnnnnnnnnnnnnnnnnnnnnnnnnnnnnnnnnnnnnnnnnnnnnnnnnnnnnnnnnnnnnnnnnnnnnnnnnnnnnnnnnnnnnnnnnnnnnnnnnnnnnnnnnnnnnnnnnnnnnnnnnnnnnnnnnnnnnnnnnnnnnnnnnnnnnnnnnnnnnnnnnnnnnnnnnnnnnnnnnnnnnnnnnnnnnnnnnnnnnnnnnnnnnnnnnnnnnnnnnnnnnnnnnnnnnnnnnnnnnnnnnnnnnnnnnnnnnnnnnnnnnnnnnnnnnnnnnnnnnnnnnnnnnnnnnnnnnnnnnnnnnnnnnnnnnnnnnnnnnnnnnnnnnnnnnnnnnnnnnnnnnnnnnnnnnnnnnnnnnnnnnnnnnnnnnnnnnnnnnnnnnnnnnnnnnnnnnnnnnnnnnnnnnnnnnnnnnnnnnnnnnnnnnnnnnnnnnnnnnnnnnnnnnnnnnnnnnnnnnnnnnnnnnnnnnnnnnnnnnnnnnnnnnnnnnnnnnnnnnnnnnnnnnnnnnnnnnnnnnnnnnnnnnnnnnnnnnnnnnnnnnnnnnnnnnnnnnnnnnnnnnnnnnnnnnnnnnnnnnnnnnnnnnnnnnnnnnnnnnnnnnnnnnnnnnnnnnnnnnnnnnnnnnnnnnnnnnnnnnnnnnnnnnnnnnnnnnnnnnnnnnnnnnnnnnnnnnnnnnnnnnnnnnnnnnnnnnnnnnnnnnnnnnnnnnnnnnnnnnnnnnnnnnnnnnnnnnnnnnnnnnnnnnnnnnnnnnnnnnnnnnnnnnnnnnnnnnnnnnnnnnnnnnnnnnnnnnnnnnnnnnnnnnnnnnnnnnnnnnnnnnnnnnnnnnnnnnnnnnnnnnnnnnnnnnnnnnnnnnnnnnnnnnnnnnnnnnnnnnnnnnnnnnnnnnnnnnnnnnnnnnnnnnnnnnnnnnnnnnnnnnnnnnnnnnnnnnnnnnnnnnnnnnnnnnnnnnnnnnnnnnnnnnnnnnnnnnnnnnnnnnnnnnnnnnnnnnnnnnnnnnnnnnnnnnnnnnnnnnnnnnnnnnnnnnnnnnnnnnnnnnnnnnnnnnnnnnnnnnnnnnnnnnnnnnnnnnnnnnnnnnnnnnnnnnnnnnnnnnnnnnnnnnnnnnnnnnnnnnnnnnnnnnnnnnnnnnnnnnnnnnnnnnnnnnnnnnnnnnnnnnnnnnnnnnnnnnnnnnnnnnnnnnnnnnnnnnnnnnnnnnnnnnnnnnnnnnnnnnnnnnnnnnnnnnnnnnnnnnnnnnnnnnnnnnnnnnnnnnnnnnnnnnnnnnnnnnnnnnnnnnnnnnnnnnnnnnnnnnnnnnnnnnnnnnnnnnnnnnnnnnnnnnnnnnnnnnnnnnnnnnnnnnnnnnnnnnnnnnnnnnnnnnnnnnnnnnnnnnnnnnnnnnnnnnnnnnnnnnnnnnnnnnnnnnnnnnnnnnnnnnnnnnnnnnnnnnnnnnnnnnnnnnnnnnnnnnnnnnnnnnnnnnnnnnnnnnnnnnnnnnnnnnnnnnnnnnnnnnnnnnnnnnnnnnnnnnnnnnnnnnnnnnnnnnnnnnnnnnnnnnnnnnnnnnnnnnnnnnnnnnnnnnnnnnnnnnnnnnnnnnnnnnnnnnnnnnnnnnnnnnnnnnnnnnnnnnnnnnnnnnnnnnnnnnnnnnnnnnnnnnnnnnnnnnnnnnnnnnnnnnnnnnnnnnnnnnnnnnnnnnnnnnnnnnnnnnnnnnnnnnnnnnnnnnnnnnnnnnnnnnnnnnnnnnnnnnnnnnnnnnnnnnnnnnnnnnnnnnnnnnnnnnnnnnnnnnnnnnnnnnnnnnnnnnnnnnnnnnnnnnnnnnnnnnnnnnnnnnnnnnnnnnnnnnnnnnnnnnnnnnnnnnnnnnnnnnnnnnnnnnnnnnnnnnnnnnnnnnnnnnnnnnnnnnnnnnnnnnnnnnnnnnnnnnnnnnnnnnnnnnnnnnnnnnnnnnnnnnnnnnnnnnnnnnnnnnnnnnnnnnnnnnnnnnnnnnnnnnnnnnnnnnnnnnnnnnnnnnnnnnnnnnnnnnnnnnnnnnnnnnnnnnnnnnnnnnnnnnnnnnnnnnnnnnnnnnnnnnnnnnnnnnnnnnnnnnnnnnnnnnnnnnnnnnnnnnnnnnnnnnnnnnnnnnnnnnnnnnnnnnnnnnnnnnnnnnnnnnnnnnnnnnnnnnnnnnnnnnnnnnnnnnnnnnnnnnnnnnnnnnnnnnnnnnnnnnnnnnnnnnnnnnnnnnnnnnnnnnnnnnnnnnnnnnnnnnnnnnnnnnnnnnnnnnnnnnnnnnnnnnnnnnnnnnnnnnnnnnnnnnnnnnnnnnnnnnnnnnnnnnnnnnnnnnnnnnnnnnnnnnnnnnnnnnnnnnnnnnnnnnnnnnnnnnnnnnnnnnnnnnnnnnnnnnnnnnnnnnnnnnnnnnnnnnnnnnnnnnnnnnnnnnnnnnnnnnnnnnnnnnnnnnnnnnnnnnnnnnnnnnnnnnnnnnnnnnnnnnnnnnnnnnnnnnnnnnnnnnnnnnnnnnnnnnnnnnnnnnnnnnnnnnnnnnnnnnnnnnnnnnnnnnnnnnnnnnnnnnnnnnnnnnnnnnnnnnnnnnnnnnnnnnnnnnnnnnnnnnnnnnnnnnnnnnnnnnnnnnnnnnnnnnnnnnnnnnnnnnnnnnnnnnnnnnnnnnnnnnnnnnnnnnnnnnnnnnnnnnnnnnnnnnnnnnnnnnnnnnnnnnnnnnnnnnnnnnnnnnnnnnnnnnnnnnnnnnnnnnnnnnnnnnnnnnnnnnnnnnnnnnnnnnnnnnnnnnnnnnnnnnnnnnnnnnnnnnnnnnnnnnnnnnnnnnnnnnnnnnnnnnnnnnnnnnnnnnnnnnnnnnnnnnnnnnnnnnnnnnnnnnnnnnnnnnnnnnnnnnnnnnnnnnnnnnnnnnnnnnnnnnnnnnnnnnnnnnnnnnnnnnnnnnnnnnnnnnnnnnnnnnnnnnnnnnnnnnnnnnnnnnnnnnnnnnnnnnnnnnnnnnnnnnnnnnnnnnnnnnnnnnnnnnnnnnnnnnnnnnnnnnnnnnnnnnnnnnnnnnnnnnnnnnnnnnnnnnnnnnnnnnnnnnnnnnnnnnnnnnnnnnnnnnnnnnnnnnnnnnnnnnnnnnnnnnnnnnnnnnnnnnnnnnnnnnnnnnnnnnnnnnnnnnnnnnnnnnnnnnnnnnnnnnnnnnnnnnnnnnnnnnnnnnnnnnnnnnnnnnnnnnnnnnnnnnnnnnnnnnnnnnnnnnnnnnnnnnnnnnnnnnnnnnnnnnnnnnnnnnnnnnnnnnnnnnnnnnnnnnnnnnnnnnnnnnnnnnnnnnnnnnnnnnnnnnnnnnnnnnnnnnnnnnnnnnnnnnnnnnnnnnnnnnnnnnnnnnnnnnnnnnnnnnnnnnnnnnnnnnnnnnnnnnnnnnnnnnnnnnnnnnnnnnnnnnnnnnnnnnnnnnnnnnnnnnnnnnnnnnnnnnnnnnnnnnnnnnnnnnnnnnnnnnnnnnnnnnnnnnnnnnnnnnnnnnnnnnnnnnnnnnnnnnnnnnnnnnnnnnnnnnnnnnnnnnnnnnnnnnnnnnnnnnnnnnnnnnnnnnnnnnnnnnnnnnnnnnnnnnnnnnnnnnnnnnnnnnnnnnnnnnnnnnnnnnnnnnnnnnnnnnnnnnnnnnnnnnnnnnnnnnnnnnnnnnnnnnnnnnnnnnnnnnnnnnnnnnnnnnnnnnnnnnnnnnnnnnnnnnnnnnnnnnnnnnnnnnnnnnnnnnnnnnnnnnnnnnnnnnnnnnnnnnnnnnnnnnnnnnnnnnnnnnnnnnnnnnnnnnnnnnnnnnnnnnnnnnnnnnnnnnnnnnnnnnnnnnnnnnnnnnnnnnnnnnnnnnnnnnnnnnnnnnnnnnnnnnnnnnnnnnnnnnnnnnnnnnnnnnnnnnnnnnnnnnnnnnnnnnnnnnnnnnnnnnnnnnnnnnnnnnnnnnnnnnnnnnnnnnnnnnnnnnnnnnnnnnnnnnnnnnnnnnnnnnnnnnnnnnnnnnnnnnnnnnnnnnnnnnnnnnnnnnnnnnnnnnnnnnnnnnnnnnnnnnnnnnnnnnnnnnnnnnnnnnnnnnnnnnnnnnnnnnnnnnnnnnnnnnnnnnnnnnnnnnnnnnnnnnnnnnnnnnnnnnnnnnnnnnnnnnnnnnnnnnnnnnnnnnnnnnnnnnnnnnnnnnnnnnnnnnnnnnnnnnnnnnnnnnnnnnnnnnnnnnnnnnnnnnnnnnnnnnnnnnnnnnnnnnnnnnnnnnnnnnnnnnnnnnnnnnnnnnnnnnnnnnnnnnnnnnnnnnnnnnnnnnnnnnnnnnnnnnnnnnnnnnnnnnnnnnnnnnnnnnnnnnnnnnnnnnnnnnnnnnnnnnnnnnnnnnnnnnnnnnnnnnnnnnnnnnnnnnnnnnnnnnnnnnnnnnnnnnnnnnnnnnnnnnnnnnnnnnnnnnnnnnnnnnnnnnnnnnnnnnnnnnnnnnnnnnnnnnnnnnnnnnnnnnnnnnnnnnnnnnnnnnnnnnnnnnnnnnnnnnnnnnnnnnnnnnnnnnnnnnnnnnnnnnnnnnnnnnnnnnnnnnnnnnnnnnnnnnnnnnnnnnnnnnnnnnnnnnnnnnnnnnnnnnnnnnnnnnnnnnnnnnnnnnnnnnnnnnnnnnnnnnnnnnnnnnnnnnnnnnnnnnnnnnnnnnnnnnnnnnnnnnnnnnnnnnnnnnnnnnnnnnnnnnnnnnnnnnnnnnnnnnnnnnnnnnnnnnnnnnnnnnnnnnnnnnnnnnnnnnnnnnnnnnnnnnnnnnnnnnnnnnnnnnnnnnnnnnnnnnnnnnnnnnnnnnnnnnnnnnnnnnnnnnnnnnnnnnnnnnnnnnnnnnnnnnnnnnnnnnnnnnnnnnnnnnnnnnnnnnnnnnnnnnnnnnnnnnnnnnnnnnnnnnnnnnnnnnnnnnnnnnnnnnnnnnnnnnnnnnnnnnnnnnnnnnnnnnnnnnnnnnnnnnnnnnnnnnnnnnnnnnnnnnnnnnnnnnnnnnnnnnnnnnnnnnnnnnnnnnnnnnnnnnnnnnnnnnnnnnnnnnnnnnnnnnnnnnnnnnnnnnnnnnnnnnnnnnnnnnnnnnnnnnnnnnnnnnnnnnnnnnnnnnnnnnnnnnnnnnnnnnnnnnnnnnnnnnnnnnnnnnnnnnnnnnnnnnnnnnnnnnnnnnnnnnnnnnnnnnnnnnnnnnnnnnnnnnnnnnnnnnnnnnnnnnnnnnnnnnnnnnnnnnnnnnnnnnnnnnnnnnnnnnnnnnnnnnnnnnnnnnnnnnnnnnnnnnnnnnnnnnnnnnnnnnnnnnnnnnnnnnnnnnnnnnnnnnnnnnnnnnnnnnnnnnnnnnnnnnnnnnnnnnnnnnnnnnnnnnnnnnnnnnnnnnnnnnnnnnnnnnnnnnnnnnnnnnnnnnnnnnnnnnnnnnnnnnnnnnnnnnnnnnnnnnnnnnnnnnnnnnnnnnnnnnnnnnnnnnnnnnnnnnnnnnnnnnnnnnnnnnnnnnnnnnnnnnnnnnnnnnnnnnnnnnnnnnnnnnnnnnnnnnnnnnnnnnnnnnnnnnnnnnnnnnnnnnnnnnnnnnnnnnnnnnnnnnnnnnnnnnnnnnnnnnnnnnnnnnnnnnnnnnnnnnnnnnnnnnnnnnnnnnnnnnnnnnnnnnnnnnnnnnnnnnnnnnnnnnnnnnnnnnnnnnnnnnnnnnnnnnnnnnnnnnnnnnnnnnnnnnnnnnnnnnnnnnnnnnnnnnnnnnnnnnnnnnnnnnnnnnnnnnnnnnnnnnnnnnnnnnnnnnnnnnnnnnnnnnnnnnnnnnnnnnnnnnnnnnnnnnnnnnnnnnnnnnnnnnnnnnnnnnnnnnnnnnnnnnnnnnnnnnnnnnnnnnnnnnnnnnnnnnnnnnnnnnnnnnnnnnnnnnnnnnnnnnnnnnnnnnnnnnnnnnnnnnnnnnnnnnnnnnnnnnnnnnnnnnnnnnnnnnnnnnnnnnnnnnnnnnnnnnnnnnnnnnnnnnnnnnnnnnnnnnnnnnnnnnnnnnnnnnnnnnnnnnnnnnnnnnnnnnnnnnnnnnnnnnnnnnnnnnnnnnnnnnnnnnnnnnnnnnnnnnnnnnnnnnnnnnnnnnnnnnnnnnnnnnnnnnnnnnnnnnnnnnnnnnnnnnnnnnnnnnnnnnnnnnnnnnnnnnnnnnnnnnnnnnnnnnnnnnnnnnnnnnnnnnnnnnnnnnnnnnnnnnnnnnnnnnnnnnnnnnnnnnnnnnnnnnnnnnnnnnnnnnnnnnnnnnnnnnnnnnnnnnnnnnnnnnnnnnnnnnnnnnnnnnnnnnnnnnnnnnnnnnnnnnnnnnnnnnnnnnnnnnnnnnnnnnnnnnnnnnnnnnnnnnnnnnnnnnnnnnnnnnnnnnnnnnnnnnnnnnnnnnnnnnnnnnnnnnnnnnnnnnnnnnnnnnnnnnnnnnnnnnnnnnnnnnnnnnnnnnnnnnnnnnnnnnnnnnnnnnnnnnnnnnnnnnnnnnnnnnnnnnnnnnnnnnnnnnnnnnnnnnnnnnnnnnnnnnnnnnnnnnnnnnnnnnnnnnnnnnnnnnnnnnnnnnnnnnnnnnnnnnnnnnnnnnnnnnnnnnnnnnnnnnnnnnnnnnnnnnnnnnnnnnnnnnnnnnnnnnnnnnnnnnnnnnnnnnnnnnnnnnnnnnnnnnnnnnnnnnnnnnnnnnnnnnnnnnnnnnnnnnnnnnnnnnnnnnnnnnnnnnnnnnnnnnnnnnnnnnnnnnnnnnnnnnnnnnnnnnnnnnnnnnnnnnnnnnnnnnnnnnnnnnnnnnnnnnnnnnnnnnnnnnnnnnnnnnnnnnnnnnnnnnnnnnnnnnnnnnnnnnnnnnnnnnnnnnnnnnnnnnnnnnnnnnnnnnnnnnnnnnnnnnnnnnnnnnnnnnnnnnnnnnnnnnnnnnnnnnnnnnnnnnnnnnnnnnnnnnnnnnnnnnnnnnnnnnnnnnnnnnnnnnnnnnnnnnnnnnnnnnnnnnnnnnnnnnnnnnnnnnnnnnnnnnnnnnnnnnnnnnnnnnnnnnnnnnnnnnnnnnnnnnnnnnnnnnnnnnnnnnnnnnnnnnnnnnnnnnnnnnnnnnnnnnnnnnnnnnnnnnnnnnnnnnnnnnnnnnnnnnnnnnnnnnnnnnnnnnnnnnnnnnnnnnnnnnnnnnnnnnnnnnnnnnnnnnnnnnnnnnnnnnnnnnnnnnnnnnnnnnnnnnnnnnnnnnnnnnnnnnnnnnnnnnnnnnnnnnnnnnnnnnnnnnnnnnnnnnnnnnnnnnnnnnnnnnnnnnnnnnnnnnnnnnnnnnnnnnnnnnnnnnnnnnnnnnnnnnnnnnnnnnnnnnnnnnnnnnnnnnnnnnnnnnnnnnnnnnnnnnnnnnnnnnnnnnnnnnnnnnnnnnnnnnnnnnnnnnnnnnnnnnnnnnnnnnnnnnnnnnnnnnnnnnnnnnnnnnnnnnnnnnnnnnnnnnnnnnnnnnnnnnnnnnnnnnnnnnnnnnnnnnnnnnnnnnnnnnnnnnnnnnnnnnnnnnnnnnnnnnnnnnnnnnnnnnnnnnnnnnnnnnnnnnnnnnnnnnnnnnnnnnnnnnnnnnnnnnnnnnnnnnnnnnnnnnnnnnnnnnnnnnnnnnnnnnnnnnnnnnnnnnnnnnnnnnnnnnnnnnnnnnnnnnnnnnnnnnnnnnnnnnnnnnnnnnnnnnnnnnnnnnnnnnnnnnnnnnnnnnnnnnnnnnnnnnnnnnnnnnnnnnnnnnnnnnnnnnnnnnnnnnnnnnnnnnnnnnnnnnnnnnnnnnnnnnnnnnnnnnnnnnnnnnnnnnnnnnnnnnnnnnnnnnnnnnnnnnnnnnnnnnnnnnnnnnnnnnnnnnnnnnnnnnnnnnnnnnnnnnnnnnnnnnnnnnnnnnnnnnnnnnnnnnnnnnnnnnnnnnnnnnnnnnnnnnnnnnnnnnnnnnnnnnnnnnnnnnnnnnnnnnnnnnnnnnnnnnnnnnnnnnnnnnnnnnnnnnnnnnnnnnnnnnnnnnnnnnnnnnnnnnnnnnnnnnnnnnnnnnnnnnnnnnnnnnnnnnnnnnnnnnnnnnnnnnnnnnnnnnnnnnnnnnnnnnnnnnnnnnnnnnnnnnnnnnnnnnnnnnnnnnnnnnnnnnnnnnnnnnnnnnnnnnnnnnnnnnnnnnnnnnnnnnnnnnnnnnnnnnnnnnnnnnnnnnnnnnnnnnnnnnnnnnnnnnnnnnnnnnnnnnnnnnnnnnnnnnnnnnnnnnnnnnnnnnnnnnnnnnnnnnnnnnnnnnnnnnnnnnnnnnnnnnnnnnnnnnnnnnnnnnnnnnnnnnnnnnnnnnnnnnnnnnnnnnnnnnnnnnnnnnnnnnnnnnnnnnnnnnnnnnnnnnnnnnnnnnnnnnnnnnnnnnnnnnnnnnnnnnnnnnnnnnnnnnnnnnnnnnnnnnnnnnnnnnnnnnnnnnnnnnnnnnnnnnnnnnnnnnnnnnnnnnnnnnnnnnnnnnnnnnnnnnnnnnnnnnnnnnnnnnnnnnnnnnnnnnnnnnnnnnnnnnnnnnnnnnnnnnnnnnnnnnnnnnnnnnnnnnnnnnnnnnnnnnnnnnnnnnnnnnnnnnnnnnnnnnnnnnnnnnnnnnnnnnnnnnnnnnnnnnnnnnnnnnnnnnnnnnnnnnnnnnnnnnnnnnnnnnnnnnnnnnnnnnnnnnnnnnnnnnnnnnnnnnnnnnnnnnnnnnnnnnnnnnnnnnnnnnnnnnnnnnnnnnnnnnnnnnnnnnnnnnnnnnnnnnnnnnnnnnnnnnnnnnnnnnnnnnnnnnnnnnnnnnnnnnnnnnnnnnnnnnnnnnnnnnnnnnnnnnnnnnnnnnnnnnnnnnnnnnnnnnnnnnnnnnnnnnnnnnnnnnnnnnnnnnnnnnnnnnnnnnnnnnnnnnnnnnnnnnnnnnnnnnnnnnnnnnnnnnnnnnnnnnnnnnnnnnnnnnnnnnnnnnnnnnnnnnnnnnnnnnnnnnnnnnnnnnnnnnnnnnnnnnnnnnnnnnnnnnnnnnnnnnnnnnnnnnnnnnnnnnnnnnnnnnnnnnnnnnnnnnnnnnnnnnnnnnnnnnnnnnnnnnnnnnnnnnnnnnnnnnnnnnnnnnnnnnnnnnnnnnnnnnnnnnnnnnnnnnnnnnnnnnnnnnnnnnnnnnnnnnnnnnnnnnnnnnnnnnnnnnnnnnnnnnnnnnnnnnnnnnnnnnnnnnnnnnnnnnnnnnnnnnnnnnnnnnnnnnnnnnnnnnnnnnnnnnnnnnnnnnnnnnnnnnnnnnnnnnnnnnnnnnnnnnnnnnnnnnnnnnnnnnnnnnnnnnnnnnnnnnnnnnnnnnnnnnnnnnnnnnnnnnnnnnnnnnnnnnnnnnnnnnnnnnnnnnnnnnnnnnnnnnnnnnnnnnnnnnnnnnnnnnnnnnnnnnnnnnnnnnnnnnnnnnnnnnnnnnnnnnnnnnnnnnnnnnnnnnnnnnnnnnnnnnnnnnnnnnnnnnnnnnnnnnnnnnnnnnnnnnnnnnnnnnnnnnnnnnnnnnnnnnnnnnnnnnnnnnnnnnnnnnnnnnnnnnnnnnnnnnnnnnnnnnnnnnnnnnnnnnnnnnnnnnnnnnnnnnnnnnnnnnnnnnnnnnnnnnnnnnnnnnnnnnnnnnnnnnnnnnnnnnnnnnnnnnnnnnnnnnnnnnnnnnnnnnnnnnnnnnnnnnnnnnnnnnnnnnnnnnnnnnnnnnnnnnnnnnnnnnnnnnnnnnnnnnnnnnnnnnnnnnnnnnnnnnnnnnnnnnnnnnnnnnnnnnnnnnnnnnnnnnnnnnnnnnnnnnnnnnnnnnnnnnnnnnnnnnnnnnnnnnnnnnnnnnnnnnnnnnnnnnnnnnnnnnnnnnnnnnnnnnnnnnnnnnnnnnnnnnnnnnnnnnnnnnnnnnnnnnnnnnnnnnnnnnnnnnnnnnnnnnnnnnnnnnnnnnnnnnnnnnnnnnnnnnnnnnnnnnnnnnnnnnnnnnnnnnnnnnnnnnnnnnnnnnnnnnnnnnnnnnnnnnnnnnnnnnnnnnnnnnnnnnnnnnnnnnnnnnnnnnnnnnnnnnnnnnnnnnnnnnnnnnnnnnnnnnnnnnnnnnnnnnnnnnnnnnnnnnnnnnnnnnnnnnnnnnnnnnnnnnnnnnnnnnnnnnnnnnnnnnnnnnnnnnnnnnnnnnnnnnnnnnnnnnnnnnnnnnnnnnnnnnnnnnnnnnnnnnnnnnnnnnnnnnnnnnnnnnnnnnnnnnnnnnnnnnnnnnnnnnnnnnnnnnnnnnnnnnnnnnnnnnnnnnnnnnnnnnnnnnnnnnnnnnnnnnnnnnnnnnnnnnnnnnnnnnnnnnnnnnnnnnnnnnnnnnnnnnnnnnnnnnnnnnnnnnnnnnnnnnnnnnnnnnnnnnnnnnnnnnnnnnnnnnnnnnnnnnnnnnnnnnnnnnnnnnnnnnnnnnnnnnnnnnnnnnnnnnnnnnnnnnnnnnnnnnnnnnnnnnnnnnnnnnnnnnnnnnnnnnnnnnnnnnnnnnnnnnnnnnnnnnnnnnnnnnnnnnnnnnnnnnnnnnnnnnnnnnnnnnnnnnnnnnnnnnnnnnnnnnnnnnnnnnnnnnnnnnnnnnnnnnnnnnnnnnnnnnnnnnnnnnnnnnnnnnnnnnnnnnnnnnnnnnnnnnnnnnnnnnnnnnnnnnnnnnnnnnnnnnnnnnnnnnnnnnnnnnnnnnnnnnnnnnnnnnnnnnnnnnnnnnnnnnnnnnnnnnnnnnnnnnnnnnnnnnnnnnnnnnnnnnnnnnnnnnnnnnnnnnnnnnnnnnnnnnnnnnnnnnnnnnnnnnnnnnnnnnnnnnnnnnnnnnnnnnnnnnnnnnnnnnnnnnnnnnnnnnnnnnnnnnnnnnnnnnnnnnnnnnnnnnnnnnnnnnnnnnnnnnnnnnnnnnnnnnnnnnnnnnnnnnnnnnnnnnnnnnnnnnnnnnnnnnnnnnnnnnnnnnnnnnnnnnnnnnnnnnnnnnnnnnnnnnnnnnnnnnnnnnnnnnnnnnnnnnnnnnnnnnnnnnnnnnnnnnnnnnnnnnnnnnnnnnnnnnnnnnnnnnnnnnnnnnnnnnnnnnnnnnnnnnnnnnnnnnnnnnnnnnnnnnnnnnnnnnnnnnnnnnnnnnnnnnnnnnnnnnnnnnnnnnnnnnnnnnnnnnnnnnnnnnnnnnnnnnnnnnnnnnnnnnnnnnnnnnnnnnnnnnnnnnnnnnnnnnnnnnnnnnnnnnnnnnnnnnnnnnnnnnnnnnnnnnnnnnnnnnnnnnnnnnnnnnnnnnnnnnnnnnnnnnnnnnnnnnnnnnnnnnnnnnnnnnnnnnnnnnnnnnnnnnnnnnnnnnnnnnnnnnnnnnnnnnnnnnnnnnnnnnnnnnnnnnnnnnnnnnnnnnnnnnnnnnnnnnnnnnnnnnnnnnnnnnnnnnnnnnnnnnnnnnnnnnnnnnnnnnnnnnnnnnnnnnnnnnnnnnnnnnnnnnnnnnnnnnnnnnnnnnnnnnnnnnnnnnnnnnnnnnnnnnnnnnnnnnnnnnnnnnnnnnnnnnnnnnnnnnnnnnnnnnnnnnnnnnnnnnnnnnnnnnnnnnnnnnnnnnnnnnnnnnnnnnnnnnnnnnnnnnnnnnnnnnnnnnnnnnnnnnnnnnnnnnnnnnnnnnnnnnnnnnnnnnnnnnnnnnnnnnnnnnnnnnnnnnnnnnnnnnnnnnnnnnnnnnnnnnnnnnnnnnnnnnnnnnnnnnnnnnnnnnnnnnnnnnnnnnnnnnnnnnnnnnnnnnnnnnnnnnnnnnnnnnnnnnnnnnnnnnnnnnnnnnnnnnnnnnnnnnnnnnnnnnnnnnnnnnnnnnnnnnnnnnnnnnnnnnnnnnnnnnnnnnnnnnnnnnnnnnnnnnnnnnnnnnnnnnnnnnnnnnnnnnnnnnnnnnnnnnnnnnnnnnnnnnnnnnnnnnnnnnnnnnnnnnnnnnnnnnnnnnnnnnnnnnnnnnnnnnnnnnnnnnnnnnnnnnnnnnnnnnnnnnnnnnnnnnnnnnnnnnnnnnnnnnnnnnnnnnnnnnnnnnnnnnnnnnnnnnnnnnnnnnnnnnnnnnnnnnnnnnnnnnnnnnnnnnnnnnnnnnnnnnnnnnnnnnnnnnnnnnnnnnnnnnnnnnnnnnnnnnnnnnnnnnnnnnnnnnnnnnnnnnnnnnnnnnnnnnnnnnnnnnnnnnnnnnnnnnnnnnnnnnnnnnnnnnnnnnnnnnnnnnnnnnnnnnnnnnnnnnnnnnnnnnnnnnnnnnnnnnnnnnnnnnnnnnnnnnnnnnnnnnnnnnnnnnnnnnnnnnnnnnnnnnnnnnnnnnnnnnnnnnnnnnnnnnnnnnnnnnnnnnnnnnnnnnnnnnnnnnnnnnnnnnnnnnnnnnnnnnnnnnnnnnnnnnnnnnnnnnnnnnnnnnnnnnnnnnnnnnnnnnnnnnnnnnnnnnnnnnnnnnnnnnnnnnnnnnnnnnnnnnnnnnnnnnnnnnnnnnnnnnnnnnnnnnnnnnnnnnnnnnnnnnnnnnnnnnnnnnnnnnnnnnnnnnnnnnnnnnnnnnnnnnnnnnnnnnnnnnnnnnnnnnnnnnnnnnnnnnnnnnnnnnnnnnnnnnnnnnnnnnnnnnnnnnnnnnnnnnnnnnnnnnnnnnnnnnnnnnnnnnnnnnnnnnnnnnnnnnnnnnnnnnnnnnnnnnnnnnnnnnnnnnnnnnnnnnnnnnnnnnnnnnnnnnnnnnnnnnnnnnnnnnnnnnnnnnnnnnnnnnnnnnnnnnnnnnnnnnnnnnnnnnnnnnnnnnnnnnnnnnnnnnnnnnnnnnnnnnnnnnnnnnnnnnnnnnnnnnnnnnnnnnnnnnnnnnnnnnnnnnnnnnnnnnnnnnnnnnnnnnnnnnnnnnnnnnnnnnnnnnnnnnnnnnnnnnnnnnnnnnnnnnnnnnnnnnnnnnnnnnnnnnnnnnnnnnnnnnnnnnnnnnnnnnnnnnnnnnnnnnnnnnnnnnnnnnnnnnnnnnnnnnnnnnnnnnnnnnnnnnnnnnnnnnnnnnnnnnnnnnnnnnnnnnnnnnnnnnnnnnnnnnnnnnnnnnnnnnnnnnnnnnnnnnnnnnnnnnnnnnnnnnnnnnnnnnnnnnnnnnnnnnnnnnnnnnnnnnnnnnnnnnnnnnnnnnnnnnnnnnnnnnnnnnnnnnnnnnnnnnnnnnnnnnnnnnnnnnnnnnnnnnnnnnnnnnnnnnnnnnnnnnnnnnnnnnnnnnnnnnnnnnnnnnnnnnnnnnnnnnnnnnnnnnnnnnnnnnnnnnnnnnnnnnnnnnnnnnnnnnnnnnnnnnnnnnnnnnnnnnnnnnnnnnnnnnnnnnnnnnnnnnnnnnnnnnnnnnnnnnnnnnnnnnnnnnnnnnnnnnnnnnnnnnnnnnnnnnnnnnnnnnnnnnnnnnnnnnnnnnnnnnnnnnnnnnnnnnnnnnnnnnnnnnnnnnnnnnnnnnnnnnnnnnnnnnnnnnnnnnnnnnnnnnnnnnnnnnnnnnnnnnnnnnnnnnnnnnnnnnnnnnnnnnnnnnnnnnnnnnnnnnnnnnnnnnnnnnnnnnnnnnnnnnnnnnnnnnnnnnnnnnnnnnnnnnnnnnnnnnnnnnnnnnnnnnnnnnnnnnnnnnnnnnnnnnnnnnnnnnnnnnnnnnnnnnnnnnnnnnnnnnnnnnnnnnnnnnnnnnnnnnnnnnnnnnnnnnnnnnnnnnnnnnnnnnnnnnnnnnnnnnnnnnnnnnnnnnnnnnnnnnnnnnnnnnnnnnnnnnnnnnnnnnnnnnnnnnnnnnnnnnnnnnnnnnnnnnnnnnnnnnnnnnnnnnnnnnnnnnnnnnnnnnnnnnnnnnnnnnnnnnnnnnnnnnnnnnnnnnnnnnnnnnnnnnnnnnnnnnnnnnnnnnnnnnnnnnnnnnnnnnnnnnnnnnnnnnnnnnnnnnnnnnnnnnnnnnnnnnnnnnnnnnnnnnnnnnnnnnnnnnnnnnnnnnnnnnnnnnnnnnnnnnnnnnnnnnnnnnnnnnnnnnnnnnnnnnnnnnnnnnnnnnnnnnnnnnnnnnnnnnnnnnnnnnnnnnnnnnnnnnnnnnnnnnnnnnnnnnnnnnnnnnnnnnnnnnnnnnnnnnnnnnnnnnnnnnnnnnnnnnnnnnnnnnnnnnnnnnnnnnnnnnnnnnnnnnnnnnnnnnnnnnnnnnnnnnnnnnnnnnnnnnnnnnnnnnnnnnnnnnnnnnnnnnnnnnnnnnnnnnnnnnnnnnnnnnnnnnnnnnnnnnnnnnnnnnnnnnnnnnnnnnnnnnnnnnnnnnnnnnnnnnnnnnnnnnnnnnnnnnnnnnnnnnnnnnnnnnnnnnnnnnnnnnnnnnnnnnnnnnnnnnnnnnnnnnnnnnnnnnnnnnnnnnnnnnnnnnnnnnnnnnnnnnnnnnnnnnnnnnnnnnnnnnnnnnnnnnnnnnnnnnnnnnnnnnnnnnnnnnnnnnnnnnnnnnnnnnnnnnnnnnnnnnnnnnnnnnnnnnnnnnnnnnnnnnnnnnnnnnnnnnnnnnnnnnnnnnnnnnnnnnnnnnnnnnnnnnnnnnnnnnnnnnnnnnnnnnnnnnnnnnnnnnnnnnnnnnnnnnnnnnnnnnnnnnnnnnnnnnnnnnnnnnnnnnnnnnnnnnnnnnnnnnnnnnnnnnnnnnnnnnnnnnnnnnnnnnnnnnnnnnnnnnnnnnnnnnnnnnnnnnnnnnnnnnnnnnnnnnnnnnnnnnnnnnnnnnnnnnnnnnnnnnnnnnnnnnnnnnnnnnnnnnnnnnnnnnnnnnnnnnnnnnnnnnnnnnnnnnnnnnnnnnnnnnnnnnnnnnnnnnnnnnnnnnnnnnnnnnnnnnnnnnnnnnnnnnnnnnnnnnnnnnnnnnnnnnnnnnnnnnnnnnnnnnnnnnnnnnnnnnnnnnnnnnnnnnnnnnnnnnnnnnnnnnnnnnnnnnnnnnnnnnnnnnnnnnnnnnnnnnnnnnnnnnnnnnnnnnnnnnnnnnnnnnnnnnnnnnnnnnnnnnnnnnnnnnnnnnnnnnnnnnnnnnnnnnnnnnnnnnnnnnnnnnnnnnnnnnnnnnnnnnnnnnnnnnnnnnnnnnnnnnnnnnnnnnnnnnnnnnnnnnnnnnnnnnnnnnnnnnnnnnnnnnnnnnnnnnnnnnnnnnnnnnnnnnnnnnnnnnnnnnnnnnnnnnnnnnnnnnnnnnnnnnnnnnnnnnnnnnnnnnnnnnnnnnnnnnnnnnnnnnnnnnnnnnnnnnnnnnnnnnnnnnnnnnnnnnnnnnnnnnnnnnnnnnnnnnnnnnnnnnnnnnnnnnnnnnnnnnnnnnnnnnnnnnnnnnnnnnnnnnnnnnnnnnnnnnnnnnnnnnnnnnnnnnnnnnnnnnnnnnnnnnnnnnnnnnnnnnnnnnnnnnnnnnnnnnnnnnnnnnnnnnnnnnnnnnnnnnnnnnnnnnnnnnnnnnnnnnnnnnnnnnnnnnnnnnnnnnnnnnnnnnnnnnnnnnnnnnnnnnnnnnnnnnnnnnnnnnnnnnnnnnnnnnnnnnnnnnnnnnnnnnnnnnnnnnnnnnnnnnnnnnnnnnnnnnnnnnnnnnnnnnnnnnnnnnnnnnnnnnnnnnnnnnnnnnnnnnnnnnnnnnnnnnnnnnnnnnnnnnnnnnnnnnnnnnnnnnnnnnnnnnnnnnnnnnnnnnnnnnnnnnnnnnnnnnnnnnnnnnnnnnnnnnnnnnnnnnnnnnnnnnnnnnnnnnnnnnnnnnnnnnnnnnnnnnnnnnnnnnnnnnnnnnnnnnnnnnnnnnnnnnnnnnnnnnnnnnnnnnnnnnnnnnnnnnnnnnnnnnnnnnnnnnnnnnnnnnnnnnnnnnnnnnnnnnnnnnnnnnnnnnnnnnnnnnnnnnnnnnnnnnnnnnnnnnnnnnnnnnnnnnnnnnnnnnnnnnnnnnnnnnnnnnnnnnnnnnnnnnnnnnnnnnnnnnnnnnnnnnnnnnnnnnnnnnnnnnnnnnnnnnnnnnnnnnnnnnnnnnnnnnnnnnnnnnnnnnnnnnnnnnnnnnnnnnnnnnnnnnnnnnnnnnnnnnnnnnnnnnnnnnnnnnnnnnnnnnnnnnnnnnnnnnnnnnnnnnnnnnnnnnnnnnnnnnnnnnnnnnnnnnnnnnnnnnnnnnnnnnnnnnnnnnnnnnnnnnnnnnnnnnnnnnnnnnnnnnnnnnnnnnnnnnnnnnnnnnnnnnnnnnnnnnnnnnnnnnnnnnnnnnnnnnnnnnnnnnnnnnnnnnnnnnnnnnnnnnnnnnnnnnnnnnnnnnnnnnnnnnnnnnnnnnnnnnnnnnnnnnnnnnnnnnnnnnnnnnnnnnnnnnnnnnnnnnnnnnnnnnnnnnnnnnnnnnnnnnnnnnnnnnnnnnnnnnnnnnnnnnnnnnnnnnnnnnnnnnnnnnnnnnnnnnnnnnnnnnnnnnnnnnnnnnnnnnnnnnnnnnnnnnnnnnnnnnnnnnnnnnnnnnnnnnnnnnnnnnnnnnnnnnnnnnnnnnnnnnnnnnnnnnnnnnnnnnnnnnnnnnnnnnnnnnnnnnnnnnnnnnnnnnnnnnnnnnnnnnnnnnnnnnnnnnnnnnnnnnnnnnnnnnnnnnnnnnnnnnnnnnnnnnnnnnnnnnnnnnnnnnnnnnnnnnnnnnnnnnnnnnnnnnnnnnnnnnnnnnnnnnnnnnnnnnnnnnnnnnnnnnnnnnnnnnnnnnnnnnnnnnnnnnnnnnnnnnnnnnnnnnnnnnnnnnnnnnnnnnnnnnnnnnnnnnnnnnnnnnnnnnnnnnnnnnnnnnnnnnnnnnnnnnnnnnnnnnnnnnnnnnnnnnnnnnnnnnnnnnnnnnnnnnnnnnnnnnnnnnnnnnnnnnnnnnnnnnnnnnnnnnnnnnnnnnnnnnnnnnnnnnnnnnnnnnnnnnnnnnnnnnnnnnnnnnnnnnnnnnnnnnnnnnnnnnnnnnnnnnnnnnnnnnnnnnnnnnnnnnnnnnnnnnnnnnnnnnnnnnnnnnnnnnnnnnnnnnnnnnnnnnnnnnnnnnnnnnnnnnnnnnnnnnnnnnnnnnnnnnnnnnnnnnnnnnnnnnnnnnnnnnnnnnnnnnnnnnnnnnnnnnnnnnnnnnnnnnnnnnnnnnnnnnnnnnnnnnnnnnnnnnnnnnnnnnnnnnnnnnnnnnnnnnnnnnnnnnnnnnnnnnnnnnnnnnnnnnnnnnnnnnnnnnnnnnnnnnnnnnnnnnnnnnnnnnnnnnnnnnnnnnnnnnnnnnnnnnnnnnnnnnnnnnnnnnnnnnnnnnnnnnnnnnnnnnnnnnnnnnnnnnnnnnnnnnnnnnnnnnnnnnnnnnnnnnnnnnnnnnnnnnnnnnnnnnnnnnnnnnnnnnnnnnnnnnnnnnnnnnnnnnnnnnnnnnnnnnnnnnnnnnnnnnnnnnnnnnnnnnnnnnnnnnnnnnnnnnnnnnnnnnnnnnnnnnnnnnnnnnnnnnnnnnnnnnnnnnnnnnnnnnnnnnnnnnnnnnnnnnnnnnnnnnnnnnnnnnnnnnnnnnnnnnnnnnnnnnnnnnnnnnnnnnnnnnnnnnnnnnnnnnnnnnnnnnnnnnnnnnnnnnnnnnnnnnnnnnnnnnnnnnnnnnnnnnnnnnnnnnnnnnnnnnnnnnnnnnnnnnnnnnnnnnnnnnnnnnnnnnnnnnnnnnnnnnnnnnnnnnnnnnnnnnnnnnnnnnnnnnnnnnnnnnnnnnnnnnnnnnnnnnnnnnnnnnnnnnnnnnnnnnnnnnnnnnnnnnnnnnnnnnnnnnnnnnnnnnnnnnnnnnnnnnnnnnnnnnnnnnnnnnnnnnnnnnnnnnnnnnnnnnnnnnnnnnnnnnnnnnnnnnnnnnnnnnnnnnnnnnnnnnnnnnnnnnnnnnnnnnnnnnnnnnnnnnnnnnnnnnnnnnnnnnnnnnnnnnnnnnnnnnnnnnnnnnnnnnnnnnnnnnnnnnnnnnnnnnnnnnnnnnnnnnnnnnnnnnnnnnnnnnnnnnnnnnnnnnnnnnnnnnnnnnnnnnnnnnnnnnnnnnnnnnnnnnnnnnnnnnnnnnnnnnnnnnnnnnnnnnnnnnnnnnnnnnnnnnnnnnnnnnnnnnnnnnnnnnnnnnnnnnnnnnnnnnnnnnnnnnnnnnnnnnnnnnnnnnnnnnnnnnnnnnnnnnnnnnnnnnnnnnnnnnnnnnnnnnnnnnnnnnnnnnnnnnnnnnnnnnnnnnnnnnnnnnnnnnnnnnnnnnnnnnnnnnnnnnnnnnnnnnnnnnnnnnnnnnnnnnnnnnnnnnnnnnnnnnnnnnnnnnnnnnnnnnnnnnnnnnnnnnnnnnnnnnnnnnnnnnnnnnnnnnnnnnnnnnnnnnnnnnnnnnnnnnnnnnnnnnnnnnnnnnnnnnnnnnnnnnnnnnnnnnnnnnnnnnnnnnnnnnnnnnnnnnnnnnnnnnnnnnnnnnnnnnnnnnnnnnnnnnnnnnnnnnnnnnnnnnnnnnnnnnnnnnnnnnnnnnnnnnnnnnnnnnnnnnnnnnnnnnnnnnnnnnnnnnnnnnnnnnnnnnnnnnnnnnnnnnnnnnnnnnnnnnnnnnnnnnnnnnnnnnnnnnnnnnnnnnnnnnnnnnnnnnnnnnnnnnnnnnnnnnnnnnnnnnnnnnnnnnnnnnnnnnnnnnnnnnnnnnnnnnnnnnnnnnnnnnnnnnnnnnnnnnnnnnnnnnnnnnnnnnnnnnnnnnnnnnnnnnnnnnnnnnnnnnnnnnnnnnnnnnnnnnnnnnnnnnnnnnnnnnnnnnnnnnnnnnnnnnnnnnnnnnnnnnnnnnnnnnnnnnnnnnnnnnnnnnnnnnnnnnnnnnnnnnnnnnnnnnnnnnnnnnnnnnnnnnnnnnnnnnnnnnnnnnnnnnnnnnnnnnnnnnnnnnnnnnnnnnnnnnnnnnnnnnnnnnnnnnnnnnnnnnnnnnnnnnnnnnnnnnnnnnnnnnnnnnnnnnnnnnnnnnnnnnnnnnnnnnnnnnnnnnnnnnnnnnnnnnnnnnnnnnnnnnnnnnnnnnnnnnnnnnnnnnnnnnnnnnnnnnnnnnnnnnnnnnnnnnnnnnnnnnnnnnnnnnnnnnnnnnnnnnnnnnnnnnnnnnnnnnnnnnnnnnnnnnnnnnnnnnnnnnnnnnnnnnnnnnnnnnnnnnnnnnnnnnnnnnnnnnnnnnnnnnnnnnnnnnnnnnnnnnnnnnnnnnnnnnnnnnnnnnnnnnnnnnnnnnnnnnnnnnnnnnnnnnnnnnnnnnnnnnnnnnnnnnnnnnnnnnnnnnnnnnnnnnnnnnnnnnnnnnnnnnnnnnnnnnnnnnnnnnnnnnnnnnnnnnnnnnnnnnnnnnnnnnnnnnnnnnnnnnnnnnnnnnnnnnnnnnnnnnnnnnnnnnnnnnnnnnnnnnnnnnnnnnnnnnnnnnnnnnnnnnnnnnnnnnnnnnnnnnnnnnnnnnnnnnnnnnnnnnnnnnnnnnnnnnnnnnnnnnnnnnnnnnnnnnnnnnnnnnnnnnnnnnnnnnnnnnnnnnnnnnnnnnnnnnnnnnnnnnnnnnnnnnnnnnnnnnnnnnnnnnnnnnnnnnnnnnnnnnnnnnnnnnnnnnnnnnnnnnnnnnnnnnnnnnnnnnnnnnnnnnnnnnnnnnnnnnnnnnnnnnnnnnnnnnnnnnnnnnnnnnnnnnnnnnnnnnnnnnnnnnnnnnnnnnnnnnnnnnnnnnnnnnnnnnnnnnnnnnnnnnnnnnnnnnnnnnnnnnnnnnnnnnnnnnnnnnnnnnnnnnnnnnnnnnnnnnnnnnnnnnnnnnnnnnnnnnnnnnnnnnnnnnnnnnnnnnnnnnnnnnnnnnnnnnnnnnnnnnnnnnnnnnnnnnnnnnnnnnnnnnnnnnnnnnnnnnnnnnnnnnnnnnnnnnnnnnnnnnnnnnnnnnnnnnnnnnnnnnnnnnnnnnnnnnnnnnnnnnnnnnnnnnnnnnnnnnnnnnnnnnnnnnnnnnnnnnnnnnnnnnnnnnnnnnnnnnnnnnnnnnnnnnnnnnnnnnnnnnnnnnnnnnnnnnnnnnnnnnnnnnnnnnnnnnnnnnnnnnnnnnnnnnnnnnnnnnnnnnnnnnnnnnnnnnnnnnnnnnnnnnnnnnnnnnnnnnnnnnnnnnnnnnnnnnnnnnnnnnnnnnnnnnnnnnnnnnnnnnnnnnnnnnnnnnnnnnnnnnnnnnnnnnnnnnnnnnnnnnnnnnnnnnnnnnnnnnnnnnnnnnnnnnnnnnnnnnnnnnnnnnnnnnnnnnnnnnnnnnnnnnnnnnnnnnnnnnnnnnnnnnnnnnnnnnnnnnnnnnnnnnnnnnnnnnnnnnnnnnnnnnnnnnnnnnnnnnnnnnnnnnnnnnnnnnnnnnnnnnnnnnnnnnnnnnnnnnnnnnnnnnnnnnnnnnnnnnnnnnnnnnnnnnnnnnnnnnnnnnnnnnnnnnnnnnnnnnnnnnnnnnnnnnnnnnnnnnnnnnnnnnnnnnnnnnnnnnnnnnnnnnnnnnnnnnnnnnnnnnnnnnnnnnnnnnnnnnnnnnnnnnnnnnnnnnnnnnnnnnnnnnnnnnnnnnnnnnnnnnnnnnnnnnnnnnnnnnnnnnnnnnnnnnnnnnnnnnnnnnnnnnnnnnnnnnnnnnnnnnnnnnnnnnnnnnnnnnnnnnnnnnnnnnnnnnnnnnnnnnnnnnnnnnnnnnnnnnnnnnnnnnnnnnnnnnnnnnnnnnnnnnnnnnnnnnnnnnnnnnnnnnnnnnnnnnnnnnnnnnnnnnnnnnnnnnnnnnnnnnnnnnnnnnnnnnnnnnnnnnnnnnnnnnnnnnnnnnnnnnnnnnnnnnnnnnnnnnnnnnnnnnnnnnnnnnnnnnnnnnnnnnnnnnnnnnnnnnnnnnnnnnnnnnnnnnnnnnnnnnnnnnnnnnnnnnnnnnnnnnnnnnnnnnnnnnnnnnnnnnnnnnnnnnnnnnnnnnnnnnnnnnnnnnnnnnnnnnnnnnnnnnnnnnnnnnnnnnnnnnnnnnnnnnnnnnnnnnnnnnnnnnnnnnnnnnnnnnnnnnnnnnnnnnnnnnnnnnnnnnnnnnnnnnnnnnnnnnnnnnnnnnnnnnnnnnnnnnnnnnnnnnnnnnnnnnnnnnnnnnnnnnnnnnnnnnnnnnnnnnnnnnnnnnnnnnnnnnnnnnnnnnnnnnnnnnnnnnnnnnnnnnnnnnnnnnnnnnnnnnnnnnnnnnnnnnnnnnnnnnnnnnnnnnnnnnnnnnnnnnnnnnnnnnnnnnnnnnnnnnnnnnnnnnnnnnnnnnnnnnnnnnnnnnnnnnnnnnnnnnnnnnnnnnnnnnnnnnnnnnnnnnnnnnnnnnnnnnnnnnnnnnnnnnnnnnnnnnnnnnnnnnnnnnnnnnnnnnnnnnnnnnnnnnnnnnnnnnnnnnnnnnnnnnnnnnnnnnnnnnnnnnnnnnnnnnnnnnnnnnnnnnnnnnnnnnnnnnnnnnnnnnnnnnnnnnnnnnnnnnnnnnnnnnnnnnnnnnnnnnnnnnnnnnnnnnnnnnnnnnnnnnnnnnnnnnnnnnnnnnnnnnnnnnnnnnnnnnnnnnnnnnnnnnnnnnnnnnnnnnnnnnnnnnnnnnnnnnnnnnnnnnnnnnnnnnnnnnnnnnnnnnnnnnnnnnnnnnnnnnnnnnnnnnnnnnnnnnnnnnnnnnnnnnnnnnnnnnnnnnnnnnnnnnnnnnnnnnnnnnnnnnnnnnnnnnnnnnnnnnnnnnnnnnnnnnnnnnnnnnnnnnnnnnnnnnnnnnnnnnnnnnnnnnnnnnnnnnnnnnnnnnnnnnnnnnnnnnnnnnnnnnnnnnnnnnnnnnnnnnnnnnnnnnnnnnnnnnnnnnnnnnnnnnnnnnnnnnnnnnnnnnnnnnnnnnnnnnnnnnnnnnnnnnnnnnnnnnnnnnnnnnnnnnnnnnnnnnnnnnnnnnnnnnnnnnnnnnnnnnnnnnnnnnnnnnnnnnnnnnnnnnnnnnnnnnnnnnnnnnnnnnnnnnnnnnnnnnnnnnnnnnnnnnnnnnnnnnnnnnnnnnnnnnnnnnnnnnnnnnnnnnnnnnnnnnnnnnnnnnnnnnnnnnnnnnnnnnnnnnnnnnnnnnnnnnnnnnnnnnnnnnnnnnnnnnnnnnnnnnnnnnnnnnnnnnnnnnnnnnnnnnnnnnnnnnnnnnnnnnnnnnnnnnnnnnnnnnnnnnnnnnnnnnnnnnnnnnnnnnnnnnnnnnnnnnnnnnnnnnnnnnnnnnnnnnnnnnnnnnnnnnnnnnnnnnnnnnnnnnnnnnnnnnnnnnnnnnnnnnnnnnnnnnnnnnnnnnnnnnnnnnnnnnnnnnnnnnnnnnnnnnnnnnnnnnnnnnnnnnnnnnnnnnnnnnnnnnnnnnnnnnnnnnnnnnnnnnnnnnnnnnnnnnnnnnnnnnnnnnnnnnnnnnnnnnnnnnnnnnnnnnnnnnnnnnnnnnnnnnnnnnnnnnnnnnnnnnnnnnnnnnnnnnnnnnnnnnnnnnnnnnnnnnnnnnnnnnnnnnnnnnnnnnnnnnnnnnnnnnnnnnnnnnnnnnnnnnnnnnnnnnnnnnnnnnnnnnnnnnnnnnnnnnnnnnnnnnnnnnnnnnnnnnnnnnnnnnnnnnnnnnnnnnnnnnnnnnnnnnnnnnnnnnnnnnnnnnnnnnnnnnnnnnnnnnnnnnnnnnnnnnnnnnnnnnnnnnnnnnnnnnnnnnnnnnnnnnnnnnnnnnnnnnnnnnnnnnnnnnnnnnnnnnnnnnnnnnnnnnnnnnnnnnnnnnnnnnnnnnnnnnnnnnnnnnnnnnnnnnnnnnnnnnnnnnnnnnnnnnnnnnnnnnnnnnnnnnnnnnnnnnnnnnnnnnnnnnnnnnnnnnnnnnnnnnnnnnnnnnnnnnnnnnnnnnnnnnnnnnnnnnnnnnnnnnnnnnnnnnnnnnnnnnnnnnnnnnnnnnnnnnnnnnnnnnnnnnnnnnnnnnnnnnnnnnnnnnnnnnnnnnnnnnnnnnnnnnnnnnnnnnnnnnnnnnnnnnnnnnnnnnnnnnnnnnnnnnnnnnnnnnnnnnnnnnnnnnnnnnnnnnnnnnnnnnnnnnnnnnnnnnnnnnnnnnnnnnnnnnnnnnnnnnnnnnnnnnnnnnnnnnnnnnnnnnnnnnnnnnnnnnnnnnnnnnnnnnnnnnnnnnnnnnnnnnnnnnnnnnnnnnnnnnnnnnnnnnnnnnnnnnnnnnnnnnnnnnnnnnnnnnnnnnnnnnnnnnnnnnnnnnnnnnnnnnnnnnnnnnnnnnnnnnnnnnnnnnnnnnnnnnnnnnnnnnnnnnnnnnnnnnnnnnnnnnnnnnnnnnnnnnnnnnnnnnnnnnnnnnnnnnnnnnnnnnnnnnnnnnnnnnnnnnnnnnnnnnnnnnnnnnnnnnnnnnnnnnnnnnnnnnnnnnnnnnnnnnnnnnnnnnnnnnnnnnnnnnnnnnnnnnnnnnnnnnnnnnnnnnnnnnnnnnnnnnnnnnnnnnnnnnnnnnnnnnnnnnnnnnnnnnnnnnnnnnnnnnnnnnnnnnnnnnnnnnnnnnnnnnnnnnnnnnnnnnnnnnnnnnnnnnnnnnnnnnnnnnnnnnnnnnnnnnnnnnnnnnnnnnnnnnnnnnnnnnnnnnnnnnnnnnnnnnnnnnnnnnnnnnnnnnnnnnnnnnnnnnnnnnnnnnnnnnnnnnnnnnnnnnnnnnnnnnnnnnnnnnnnnnnnnnnnnnnnnnnnnnnnnnnnnnnnnnnnnnnnnnnnnnnnnnnnnnnnnnnnnnnnnnnnnnnnnnnnnnnnnnnnnnnnnnnnnnnnnnnnnnnnnnnnnnnnnnnnnnnnnnnnnnnnnnnnnnnnnnnnnnnnnnnnnnnnnnnnnnnnnnnnnnnnnnnnnnnnnnnnnnnnnnnnnnnnnnnnnnnnnnnnnnnnnnnnnnnnnnnnnnnnnnnnnnnnnnnnnnnnnnnnnnnnnnnnnnnnnnnnnnnnnnnnnnnnnnnnnnnnnnnnnnnnnnnnnnnnnnnnnnnnnnnnnnnnnnnnnnnnnnnnnnnnnnnnnnnnnnnnnnnnnnnnnnnnnnnnnnnnnnnnnnnnnnnnnnnnnnnnnnnnnnnnnnnnnnnnnnnnnnnnnnnnnnnnnnnnnnnnnnnnnnnnnnnnnnnnnnnnnnnnnnnnnnnnnnnnnnnnnnnnnnnnnnnnnnnnnnnnnnnnnnnnnnnnnnnnnnnnnnnnnnnnnnnnnnnnnnnnnnnnnnnnnnnnnnnnnnnnnnnnnnnnnnnnnnnnnnnnnnnnnnnnnnnnnnnnnnnnnnnnnnnnnnnnnnnnnnnnnnnnnnnnnnnnnnnnnnnnnnnnnnnnnnnnnnnnnnnnnnnnnnnnnnnnnnnnnnnnnnnnnnnnnnnnnnnnnnnnnnnnnnnnnnnnnnnnnnnnnnnnnnnnnnnnnnnnnnnnnnnnnnnnnnnnnnnnnnnnnnnnnnnnnnnnnnnnnnnnnnnnnnnnnnnnnnnnnnnnnnnnnnnnnnnnnnnnnnnnnnnnnnnnnnnnnnnnnnnnnnnnnnnnnnnnnnnnnnnnnnnnnnnnnnnnnnnnnnnnnnnnnnnnnnnnnnnnnnnnnnnnnnnnnnnnnnnnnnnnnnnnnnnnnnnnnnnnnnnnnnnnnnnnnnnnnnnnnnnnnnnnnnnnnnnnnnnnnnnnnnnnnnnnnnnnnnnnnnnnnnnnnnnnnnnnnnnnnnnnnnnnnnnnnnnnnnnnnnnnnnnnnnnnnnnnnnnnnnnnnnnnnnnnnnnnnnnnnnnnnnnnnnnnnnnnnnnnnnnnnnnnnnnnnnnnnnnnnnnnnnnnnnnnnnnnnnnnnnnnnnnnnnnnnnnnnnnnnnnnnnnnnnnnnnnnnnnnnnnnnnnnnnnnnnnnnnnnnnnnnnnnnnnnnnnnnnnnnnnnnnnnnnnnnnnnnnnnnnnnnnnnnnnnnnnnnnnnnnnnnnnnnnnnnnnnnnnnnnnnnnnnnnnnnnnnnnnnnnnnnnnnnnnnnnnnnnnnnnnnnnnnnnnnnnnnnnnnnnnnnnnnnnnnnnnnnnnnnnnnnnnnnnnnnnnnnnnnnnnnnnnnnnnnnnnnnnnnnnnnnnnnnnnnnnnnnnnnnnnnnnnnnnnnnnnnnnnnnnnnnnnnnnnnnnnnnnnnnnnnnnnnnnnnnnnnnnnnnnnnnnnnnnnnnnnnnnnnnnnnnnnnnnnnnnnnnnnnnnnnnnnnnnnnnnnnnnnnnnnnnnnnnnnnnnnnnnnnnnnnnnnnnnnnnnnnnnnnnnnnnnnnnnnnnnnnnnnnnnnnnnnnnnnnnnnnnnnnnnnnnnnnnnnnnnnnnnnnnnnnnnnnnnnnnnnnnnnnnnnnnnnnnnnnnnnnnnnnnnnnnnnnnnnnnnnnnnnnnnnnnnnnnnnnnnnnnnnnnnnnnnnnnnnnnnnnnnnnnnnnnnnnnnnnnnnnnnnnnnnnnnnnnnnnnnnnnnnnnnnnnnnnnnnnnnnnnnnnnnnnnnnnnnnnnnnnnnnnnnnnnnnnnnnnnnnnnnnnnnnnnnnnnnnnnnnnnnnnnnnnnnnnnnnnnnnnnnnnnnnnnnnnnnnnnnnnnnnnnnnnnnnnnnnnnnnnnnnnnnnnnnnnnnnnnnnnnnnnnnnnnnnnnnnnnnnnnnnnnnnnnnnnnnnnnnnnnnnnnnnnnnnnnnnnnnnnnnnnnnnnnnnnnnnnnnnnnnnnnnnnnnnnnnnnnnnnnnnnnnnnnnnnnnnnnnnnnnnnnnnnnnnnnnnnnnnnnnnnnnnnnnnnnnnnnnnnnnnnnnnnnnnnnnnnnnnnnnnnnnnnnnnnnnnnnnnnnnnnnnnnnnnnnnnnnnnnnnnnnnnnnnnnnnnnnnnnnnnnnnnnnnnnnnnnnnnnnnnnnnnnnnnnnnnnnnnnnnnnnnnnnnnnnnnnnnnnnnnnnnnnnnnnnnnnnnnnnnnnnnnnnnnnnnnnnnnnnnnnnnnnnnnnnnnnnnnnnnnnnnnnnnnnnnnnnnnnnnnnnnnnnnnnnnnnnnnnnnnnnnnnnnnnnnnnnnnnnnnnnnnnnnnnnnnnnnnnnnnnnnnnnnnnnnnnnnnnnnnnnnnnnnnnnnnnnnnnnnnnnnnnnnnnnnnnnnnnnnnnnnnnnnnnnnnnnnnnnnnnnnnnnnnnnnnnnnnnnnnnnnnnnnnnnnnnnnnnnnnnnnnnnnnnnnnnnnnnnnnnnnnnnnnnnnnnnnnnnnnnnnnnnnnnnnnnnnnnnnnnnnnnnnnnnnnnnnnnnnnnnnnnnnnnnnnnnnnnnnnnnnnnnnnnnnnnnnnnnnnnnnnnnnnnnnnnnnnnnnnnnnnnnnnnnnnnnnnnnnnnnnnnnnnnnnnnnnnnnnnnnnnnnnnnnnnnnnnnnnnnnnnnnnnnnnnnnnnnnnnnnnnnnnnnnnnnnnnnnnnnnnnnnnnnnnnnnnnnnnnnnnnnnnnnnnnnnnnnnnnnnnnnnnnnnnnnnnnnnnnnnnnnnnnnnnnnnnnnnnnnnnnnnnnnnnnnnnnnnnnnnnnnnnnnnnnnnnnnnnnnnnnnnnnnnnnnnnnnnnnnnnnnnnnnnnnnnnnnnnnnnnnnnnnnnnnnnnnnnnnnnnnnnnnnnnnnnnnnnnnnnnnnnnnnnnnnnnnnnnnnnnnnnnnnnnnnnnnnnnnnnnnnnnnnnnnnnnnnnnnnnnnnnnnnnnnnnnnnnnnnnnnnnnnnnnnnnnnnnnnnnnnnnnnnnnnnnnnnnnnnnnnnnnnnnnnnnnnnnnnnnnnnnnnnnnnnnnnnnnnnnnnnnnnnnnnnnnnnnnnnnnnnnnnnnnnnnnnnnnnnnnnnnnnnnnnnnnnnnnnnnnnnnnnnnnnnnnnnnnnnnnnnnnnnnnnnnnnnnnnnnnnnnnnnnnnnnnnnnnnnnnnnnnnnnnnnnnnnnnnnnnnnnnnnnnnnnnnnnnnnnnnnnnnnnnnnnnnnnnnnnnnnnnnnnnnnnnnnnnnnnnnnnnnnnnnnnnnnnnnnnnnnnnnnnnnnnnnnnnnnnnnnnnnnnnnnnnnnnnnnnnnnnnnnnnnnnnnnnnnnnnnnnnnnnnnnnnnnnnnnnnnnnnnnnnnnnnnnnnnnnnnnnnnnnnnnnnnnnnnnnnnnnnnnnnnnnnnnnnnnnnnnnnnnnnnnnnnnnnnnnnnnnnnnnnnnnnnnnnnnnnnnnnnnnnnnnnnnnnnnnnnnnnnnnnnnnnnnnnnnnnnnnnnnnnnnnnnnnnnnnnnnnnnnnnnnnnnnnnnnnnnnnnnnnnnnnnnnnnnnnnnnnnnnnnnnnnnnnnnnnnnnnnnnnnnnnnnnnnnnnnnnnnnnnnnnnnnnnnnnnnnnnnnnnnnnnnnnnnnnnnnnnnnnnnnnnnnnnnnnnnnnnnnnnnnnnnnnnnnnnnnnnnnnnnnnnnnnnnnnnnnnnnnnnnnnnnnnnnnnnnnnnnnnnnnnnnnnnnnnnnnnnnnnnnnnnnnnnnnnnnnnnnnnnnnnnnnnnnnnnnnnnnnnnnnnnnnnnnnnnnnnnnnnnnnnnnnnnnnnnnnnnnnnnnnnnnnnnnnnnnnnnnnnnnnnnnnnnnnnnnnnnnnnnnnnnnnnnnnnnnnnnnnnnnnnnnnnnnnnnnnnnnnnnnnnnnnnnnnnnnnnnnnnnnnnnnnnnnnnnnnnnnnnnnnnnnnnnnnnnnnnnnnnnnnnnnnnnnnnnnnnnnnnnnnnnnnnnnnnnnnnnnnnnnnnnnnnnnnnnnnnnnnnnnnnnnnnnnnnnnnnnnnnnnnnnnnnnnnnnnnnnnnnnnnnnnnnnnnnnnnnnnnnnnnnnnnnnnnnnnnnnnnnnnnnnnnnnnnnnnnnnnnnnnnnnnnnnnnnnnnnnnnnnnnnnnnnnnnnnnnnnnnnnnnnnnnnnnnnnnnnnnnnnnnnnnnnnnnnnnnnnnnnnnnnnnnnnnnnnnnnnnnnnnnnnnnnnnnnnnnnnnnnnnnnnnnnnnnnnnnnnnnnnnnnnnnnnnnnnnnnnnnnnnnnnnnnnnnnnnnnnnnnnnnnnnnnnnnnnnnnnnnnnnnnnnnnnnnnnnnnnnnnnnnnnnnnnnnnnnnnnnnnnnnnnnnnnnnnnnnnnnnnnnnnnnnnnnnnnnnnnnnnnnnnnnnnnnnnnnnnnnnnnnnnnnnnnnnnnnnnnnnnnnnnnnnnnnnnnnnnnnnnnnnnnnnnnnnnnnnnnnnnnnnnnnnnnnnnnnnnnnnnnnnnnnnnnnnnnnnnnnnnnnnnnnnnnnnnnnnnnnnnnnnnnnnnnnnnnnnnnnnnnnnnnnnnnnnnnnnnnnnnnnnnnnnnnnnnnnnnnnnnnnnnnnnnnnnnnnnnnnnnnnnnnnnnnnnnnnnnnnnnnnnnnnnnnnnnnnnnnnnnnnnnnnnnnnnnnnnnnnnnnnnnnnnnnnnnnnnnnnnnnnnnnnnnnnnnnnnnnnnnnnnnnnnnnnnnnnnnnnnnnnnnnnnnnnnnnnnnnnnnnnnnnnnnnnnnnnnnnnnnnnnnnnnnnnnnnnnnnnnnnnnnnnnnnnnnnnnnnnnnnnnnnnnnnnnnnnnnnnnnnnnnnnnnnnnnnnnnnnnnnnnnnnnnnnnnnnnnnnnnnnnnnnnnnnnnnnnnnnnnnnnnnnnnnnnnnnnnnnnnnnnnnnnnnnnnnnnnnnnnnnnnnnnnnnnnnnnnnnnnnnnnnnnnnnnnnnnnnnnnnnnnnnnnnnnnnnnnnnnnnnnnnnnnnnnnnnnnnnnnnnnnnnnnnnnnnnnnnnnnnnnnnnnnnnnnnnnnnnnnnnnnnnnnnnnnnnnnnnnnnnnnnnnnnnnnnnnnnnnnnnnnnnnnnnnnnnnnnnnnnnnnnnnnnnnnnnnnnnnnnnnnnnnnnnnnnnnnnnnnnnnnnnnnnnnnnnnnnnnnnnnnnnnnnnnnnnnnnnnnnnnnnnnnnnnnnnnnnnnnnnnnnnnnnnnnnnnnnnnnnnnnnnnnnnnnnnnnnnnnnnnnnnnnnnnnnnnnnnnnnnnnnnnnnnnnnnnnnnnnnnnnnnnnnnnnnnnnnnnnnnnnnnnnnnnnnnnnnnnnnnnnnnnnnnnnnnnnnnnnnnnnnnnnnnnnnnnnnnnnnnnnnnnnnnnnnnnnnnnnnnnnnnnnnnnnnnnnnnnnnnnnnnnnnnnnnnnnnnnnnnnnnnnnnnnnnnnnnnnnnnnnnnnnnnnnnnnnnnnnnnnnnnnnnnnnnnnnnnnnnnnnnnnnnnnnnnnnnnnnnnnnnnnnnnnnnnnnnnnnnnnnnnnnnnnnnnnnnnnnnnnnnnnnnnnnnnnnnnnnnnnnnnnnnnnnnnnnnnnnnnnnnnnnnnnnnnnnnnnnnnnnnnnnnnnnnnnnnnnnnnnnnnnnnnnnnnnnnnnnnnnnnnnnnnnnnnnnnnnnnnnnnnnnnnnnnnnnnnnnnnnnnnnnnnnnnnnnnnnnnnnnnnnnnnnnnnnnnnnnnnnnnnnnnnnnnnnnnnnnnnnnnnnnnnnnnnnnnnnnnnnnnnnnnnnnnnnnnnnnnnnnnnnnnnnnnnnnnnnnnnnnnnnnnnnnnnnnnnnnnnnnnnnnnnnnnnnnnnnnnnnnnnnnnnnnnnnnnnnnnnnnnnnnnnnnnnnnnnnnnnnnnnnnnnnnnnnnnnnnnnnnnnnnnnnnnnnnnnnnnnnnnnnnnnnnnnnnnnnnnnnnnnnnnnnnnnnnnnnnnnnnnnnnnnnnnnnnnnnnnnnnnnnnnnnnnnnnnnnnnnnnnnnnnnnnnnnnnnnnnnnnnnnnnnnnnnnnnnnnnnnnnnnnnnnnnnnnnnnnnnnnnnnnnnnnnnnnnnnnnnnnnnnnnnnnnnnnnnnnnnnnnnnnnnnnnnnnnnnnnnnnnnnnnnnnnnnnnnnnnnnnnnnnnnnnnnnnnnnnnnnnnnnnnnnnnnnnnnnnnnnnnnnnnnnnnnnnnnnnnnnnnnnnnnnnnnnnnnnnnnnnnnnnnnnnnnnnnnnnnnnnnnnnnnnnnnnnnnnnnnnnnnnnnnnnnnnnnnnnnnnnnnnnnnnnnnnnnnnnnnnnnnnnnnnnnnnnnnnnnnnnnnnnnnnnnnnnnnnnnnnnnnnnnnnnnnnnnnnnnnnnnnnnnnnnnnnnnnnnnnnnnnnnnnnnnnnnnnnnnnnnnnnnnnnnnnnnnnnnnnnnnnnnnnnnnnnnnnnnnnnnnnnnnnnnnnnnnnnnnnnnnnnnnnnnnnnnnnnnnnnnnnnnnnnnnnnnnnnnnnnnnnnnnnnnnnnnnnnnnnnnnnnnnnnnnnnnnnnnnnnnnnnnnnnnnnnnnnnnnnnnnnnnnnnnnnnnnnnnnnnnnnnnnnnnnnnnnnnnnnnnnnnnnnnnnnnnnnnnnnnnnnnnnnnnnnnnnnnnnnnnnnnnnnnnnnnnnnnnnnnnnnnnnnnnnnnnnnnnnnnnnnnnnnnnnnnnnnnnnnnnnnnnnnnnnnnnnnnnnnnnnnnnnnnnnnnnnnnnnnnnnnnnnnnnnnnnnnnnnnnnnnnnnnnnnnnnnnnnnnnnnnnnnnnnnnnnnnnnnnnnnnnnnnnnnnnnnnnnnnnnnnnnnnnnnnnnnnnnnnnnnnnnnnnnnnnnnnnnnnnnnnnnnnnnnnnnnnnnnnnnnnnnnnnnnnnnnnnnnnnnnnnnnnnnnnnnnnnnnnnnnnnnnnnnnnnnnnnnnnnnnnnnnnnnnnnnnnnnnnnnnnnnnnnnnnnnnnnnnnnnnnnnnnnnnnnnnnnnnnnnnnnnnnnnnnnnnnnnnnnnnnnnnnnnnnnnnnnnnnnnnnnnnnnnnnnnnnnnnnnnnnnnnnnnnnnnnnnnnnnnnnnnnnnnnnnnnnnnnnnnnnnnnnnnnnnnnnnnnnnnnnnnnnnnnnnnnnnnnnnnnnnnnnnnnnnnnnnnnnnnnnnnnnnnnnnnnnnnnnnnnnnnnnnnnnnnnnnnnnnnnnnnnnnnnnnnnnnnnnnnnnnnnnnnnnnnnnnnnnnnnnnnnnnnnnnnnnnnnnnnnnnnnnnnnnnnnnnnnnnnnnnnnnnnnnnnnnnnnnnnnnnnnnnnnnnnnnnnnnnnnnnnnnnnnnnnnnnnnnnnnnnnnnnnnnnnnnnnnnnnnnnnnnnnnnnnnnnnnnnnnnnnnnnnnnnnnnnnnnnnnnnnnnnnnnnnnnnnnnnnnnnnnnnnnnnnnnnnnnnnnnnnnnnnnnnnnnnnnnnnnnnnnnnnnnnnnnnnnnnnnnnnnnnnnnnnnnnnnnnnnnnnnnnnnnnnnnnnnnnnnnnnnnnnnnnnnnnnnnnnnnnnnnnnnnnnnnnnnnnnnnnnnnnnnnnnnnnnnnnnnnnnnnnnnnnnnnnnnnnnnnnnnnnnnnnnnnnnnnnnnnnnnnnnnnnnnnnnnnnnnnnnnnnnnnnnnnnnnnnnnnnnnnnnnnnnnnnnnnnnnnnnnnnnnnnnnnnnnnnnnnnnnnnnnnnnnnnnnnnnnnnnnnnnnnnnnnnnnnnnnnnnnnnnnnnnnnnnnnnnnnnnnnnnnnnnnnnnnnnnnnnnnnnnnnnnnnnnnnnnnnnnnnnnnnnnnnnnnnnnnnnnnnnnnnnnnnnnnnnnnnnnnnnnnnnnnnnnnnnnnnnnnnnnnnnnnnnnnnnnnnnnnnnnnnnnnnnnnnnnnnnnnnnnnnnnnnnnnnnnnnnnnnnnnnnnnnnnnnnnnnnnnnnnnnnnnnnnnnnnnnnnnnnnnnnnnnnnnnnnnnnnnnnnnnnnnnnnnnnnnnnnnnnnnnnnnnnnnnnnnnnnnnnnnnnnnnnnnnnnnnnnnnnnnnnnnnnnnnnnnnnnnnnnnnnnnnnnnnnnnnnnnnnnnnnnnnnnnnnnnnnnnnnnnnnnnnnnnnnnnnnnnnnnnnnnnnnnnnnnnnnnnnnnnnnnnnnnnnnnnnnnnnnnnnnnnnnnnnnnnnnnnnnnnnnnnnnnnnnnnnnnnnnnnnnnnnnnnnnnnnnnnnnnnnnnnnnnnnnnnnnnnnnnnnnnnnnnnnnnnnnnnnnnnnnnnnnnnnnnnnnnnnnnnnnnnnnnnnnnnnnnnnnnnnnnnnnnnnnnnnnnnnnnnnnnnnnnnnnnnnnnnnnnnnnnnnnnnnnnnnnnnnnnnnnnnnnnnnnnnnnnnnnnnnnnnnnnnnnnnnnnnnnnnnnnnnnnnnnnnnnnnnnnnnnnnnnnnnnnnnnnnnnnnnnnnnnnnnnnnnnnnnnnnnnnnnnnnnnnnnnnnnnnnnnnnnnnnnnnnnnnnnnnnnnnnnnnnnnnnnnnnnnnnnnnnnnnnnnnnnnnnnnnnnnnnnnnnnnnnnnnnnnnnnnnnnnnnnnnnnnnnnnnnnnnnnnnnnnnnnnnnnnnnnnnnnnnnnnnnnnnnnnnnnnnnnnnnnnnnnnnnnnnnnnnnnnnnnnnnnnnnnnnnnnnnnnnnnnnnnnnnnnnnnnnnnnnnnnnnnnnnnnnnnnnnnnnnnnnnnnnnnnnnnnnnnnnnnnnnnnnnnnnnnnnnnnnnnnnnnnnnnnnnnnnnnnnnnnnnnnnnnnnnnnnnnnnnnnnnnnnnnnnnnnnnnnnnnnnnnnnnnnnnnnnnnnnnnnnnnnnnnnnnnnnnnnnnnnnnnnnnnnnnnnnnnnnnnnnnnnnnnnnnnnnnnnnnnnnnnnnnnnnnnnnnnnnnnnnnnnnnnnnnnnnnnnnnnnnnnnnnnnnnnnnnnnnnnnnnnnnnnnnnnnnnnnnnnnnnnnnnnnnnnnnnnnnnnnnnnnnnnnnnnnnnnnnnnnnnnnnnnnnnnnnnnnnnnnnnnnnnnnnnnnnnnnnnnnnnnnnnnnnnnnnnnnnnnnnnnnnnnnnnnnnnnnnnnnnnnnnnnnnnnnnnnnnnnnnnnnnnnnnnnnnnnnnnnnnnnnnnnnnnnnnnnnnnnnnnnnnnnnnnnnnnnnnnnnnnnnnnnnnnnnnnnnnnnnnnnnnnnnnnnnnnnnnnnnnnnnnnnnnnnnnnnnnnnnnnnnnnnnnnnnnnnnnnnnnnnnnnnnnnnnnnnnnnnnnnnnnnnnnnnnnnnnnnnnnnnnnnnnnnnnnnnnnnnnnnnnnnnnnnnnnnnnnnnnnnnnnnnnnnnnnnnnnnnnnnnnnnnnnnnnnnnnnnnnnnnnnnnnnnnnnnnnnnnnnnnnnnnnnnnnnnnnnnnnnnnnnnnnnnnnnnnnnnnnnnnnnnnnnnnnnnnnnnnnnnnnnnnnnnnnnnnnnnnnnnnnnnnnnnnnnnnnnnnnnnnnnnnnnnnnnnnnnnnnnnnnnnnnnnnnnnnnnnnnnnnnnnnnnnnnnnnnnnnnnnnnnnnnnnnnnnnnnnnnnnnnnnnnnnnnnnnnnnnnnnnnnnnnnnnnnnnnnnnnnnnnnnnnnnnnnnnnnnnnnnnnnnnnnnnnnnnnnnnnnnnnnnnnnnnnnnnnnnnnnnnnnnnnnnnnnnnnnnnnnnnnnnnnnnnnnnnnnnnnnnnnnnnnnnnnnnnnnnnnnnnnnnnnnnnnnnnnnnnnnnnnnnnnnnnnnnnnnnnnnnnnnnnnnnnnnnnnnnnnnnnnnnnnnnnnnnnnnnnnnnnnnnnnnnnnnnnnnnnnnnnnnnnnnnnnnnnnnnnnnnnnnnnnnnnnnnnnnnnnnnnnnnnnnnnnnnnnnnnnnnnnnnnnnnnnnnnnnnnnnnnnnnnnnnnnnnnnnnnnnnnnnnnnnnnnnnnnnnnnnnnnnnnnnnnnnnnnnnnnnnnnnnnnnnnnnnnnnnnnnnnnnnnnnnnnnnnnnnnnnnnnnnnnnnnnnnnnnnnnnnnnnnnnnnnnnnnnnnnnnnnnnnnnnnnnnnnnnnnnnnnnnnnnnnnnnnnnnnnnnnnnnnnnnnnnnnnnnnnnnnnnnnnnnnnnnnnnnnnnnnnnnnnnnnnnnnnnnnnnnnnnnnnnnnnnnnnnnnnnnnnnnnnnnnnnnnnnnnnnnnnnnnnnnnnnnnnnnnnnnnnnnnnnnnnnnnnnnnnnnnnnnnnnnnnnnnnnnnnnnnnnnnnnnnnnnnnnnnnnnnnnnnnnnnnnnnnnnnnnnnnnnnnnnnnnnnnnnnnnnnnnnnnnnnnnnnnnnnnnnnnnnnnnnnnnnnnnnnnnnnnnnnnnnnnnnnnnnnnnnnnnnnnnnnnnnnnnnnnnnnnnnnnnnnnnnnnnnnnnnnnnnnnnnnnnnnnnnnnnnnnnnnnnnnnnnnnnnnnnnnnnnnnnnnnnnnnnnnnnnnnnnnnnnnnnnnnnnnnnnnnnnnnnnnnnnnnnnnnnnnnnnnnnnnnnnnnnnnnnnnnnnnnnnnnnnnnnnnnnnnnnnnnnnnnnnnnnnnnnnnnnnnnnnnnnnnnnnnnnnnnnnnnnnnnnnnnnnnnnnnnnnnnnnnnnnnnnnnnnnnnnnnnnnnnnnnnnnnnnnnnnnnnnnnnnnnnnnnnnnnnnnnnnnnnnnnnnnnnnnnnnnnnnnnnnnnnnnnnnnnnnnnnnnnnnnnnnnnnnnnnnnnnnnnnnnnnnnnnnnnnnnnnnnnnnnnnnnnnnnnnnnnnnnnnnnnnnnnnnnnnnnnnnnnnnnnnnnnnnnnnnnnnnnnnnnnnnnnnnnnnnnnnnnnnnnnnnnnnnnnnnnnnnnnnnnnnnnnnnnnnnnnnnnnnnnnnnnnnnnnnnnnnnnnnnnnnnnnnnnnnnnnnnnnnnnnnnnnnnnnnnnnnnnnnnnnnnnnnnnnnnnnnnnnnnnnnnnnnnnnnnnnnnnnnnnnnnnnnnnnnnnnnnnnnnnnnnnnnnnnnnnnnnnnnnnnnnnnnnnnnnnnnnnnnnnnnnnnnnnnnnnnnnnnnnnnnnnnnnnnnnnnnnnnnnnnnnnnnnnnnnnnnnnnnnnnnnnnnnnnnnnnnnnnnnnnnnnnnnnnnnnnnnnnnnnnnnnnnnnnnnnnnnnnnnnnnnnnnnnnnnnnnnnnnnnnnnnnnnnnnnnnnnnnnnnnnnnnnnnnnnnnnnnnnnnnnnnnnnnnnnnnnnnnnnnnnnnnnnnnnnnnnnnnnnnnnnnnnnnnnnnnnnnnnnnnnnnnnnnnnnnnnnnnnnnnnnnnnnnnnnnnnnnnnnnnnnnnnnnnnnnnnnnnnnnnnnnnnnnnnnnnnnnnnnnnnnnnnnnnnnnnnnnnnnnnnnnnnnnnnnnnnnnnnnnnnnnnnnnnnnnnnnnnnnnnnnnnnnnnnnnnnnnnnnnnnnnnnnnnnnnnnnnnnnnnnnnnnnnnnnnnnnnnnnnnnnnnnnnnnnnnnnnnnnnnnnnnnnnnnnnnnnnnnnnnnnnnnnnnnnnnnnnnnnnnnnnnnnnnnnnnnnnnnnnnnnnnnnnnnnnnnnnnnnnnnnnnnnnnnnnnnnnnnnnnnnnnnnnnnnnnnnnnnnnnnnnnnnnnnnnnnnnnnnnnnnnnnnnnnnnnnnnnnnnnnnnnnnnnnnnnnnnnnnnnnnnnnnnnnnnnnnnnnnnnnnnnnnnnnnnnnnnnnnnnnnnnnnnnnnnnnnnnnnnnnnnnnnnnnnnnnnnnnnnnnnnnnnnnnnnnnnnnnnnnnnnnnnnnnnnnnnnnnnnnnnnnnnnnnnnnnnnnnnnnnnnnnnnnnnnnnnnnnnnnnnnnnnnnnnnnnnnnnnnnnnnnnnnnnnnnnnnnnnnnnnnnnnnnnnnnnnnnnnnnnnnnnnnnnnnnnnnnnnnnnnnnnnnnnnnnnnnnnnnnnnnnnnnnnnnnnnnnnnnnnnnnnnnnnnnnnnnnnnnnnnnnnnnnnnnnnnnnnnnnnnnnnnnnnnnnnnnnnnnnnnnnnnnnnnnnnnnnnnnnnnnnnnnnnnnnnnnnnnnnnnnnnnnnnnnnnnnnnnnnnnnnnnnnnnnnnnnnnnnnnnnnnnnnnnnnnnnnnnnnnnnnnnnnnnnnnnnnnnnnnnnnnnnnnnnnnnnnnnnnnnnnnnnnnnnnnnnnnnnnnnnnnnnnnnnnnnnnnnnnnnnnnnnnnnnnnnnnnnnnnnnnnnnnnnnnnnnnnnnnnnnnnnnnnnnnnnnnnnnnnnnnnnnnnnnnnnnnnnnnnnnnnnnnnnnnnnnnnnnnnnnnnnnnnnnnnnnnnnnnnnnnnnnnnnnnnnnnnnnnnnnnnnnnnnnnnnnnnnnnnnnnnnnnnnnnnnnnnnnnnnnnnnnnnnnnnnnnnnnnnnnnnnnnnnnnnnnnnnnnnnnnnnnnnnnnnnnnnnnnnnnnnnnnnnnnnnnnnnnnnnnnnnnnnnnnnnnnnnnnnnnnnnnnnnnnnnnnnnnnnnnnnnnnnnnnnnnnnnnnnnnnnnnnnnnnnnnnnnnnnnnnnnnnnnnnnnnnnnnnnnnnnnnnnnnnnnnnnnnnnnnnnnnnnnnnnnnnnnnnnnnnnnnnnnnnnnnnnnnnnnnnnnnnnnnnnnnnnnnnnnnnnnnnnnnnnnnnnnnnnnnnnnnnnnnnnnnnnnnnnnnnnnnnnnnnnnnnnnnnnnnnnnnnnnnnnnnnnnnnnnnnnnnnnnnnnnnnnnnnnnnnnnnnnnnnnnnnnnnnnnnnnnnnnnnnnnnnnnnnnnnnnnnnnnnnnnnnnnnnnnnnnnnnnnnnnnnnnnnnnnnnnnnnnnnnnnnnnnnnnnnnnnnnnnnnnnnnnnnnnnnnnnnnnnnnnnnnnnnnnnnnnnnnnnnnnnnnnnnnnnnnnnnnnnnnnnnnnnnnnnnnnnnnnnnnnnnnnnnnnnnnnnnnnnnnnnnnnnnnnnnnnnnnnnnnnnnnnnnnnnnnnnnnnnnnnnnnnnnnnnnnnnnnnnnnnnnnnnnnnnnnnnnnnnnnnnnnnnnnnnnnnnnnnnnnnnnnnnnnnnnnnnnnnnnnnnnnnnnnnnnnnnnnnnnnnnnnnnnnnnnnnnnnnnnnnnnnnnnnnnnnnnnnnnnnnnnnnnnnnnnnnnnnnnnnnnnnnnnnnnnnnnnnnnnnnnnnnnnnnnnnnnnnnnnnnnnnnnnnnnnnnnnnnnnnnnnnnnnnnnnnnnnnnnnnnnnnnnnnnnnnnnnnnnnnnnnnnnnnnnnnnnnnnnnnnnnnnnnnnnnnnnnnnnnnnnnnnnnnnnnnnnnnnnnnnnnnnnnnnnnnnnnnnnnnnnnnnnnnnnnnnnnnnnnnnnnnnnnnnnnnnnnnnnnnnnnnnnnnnnnnnnnnnnnnnnnnnnnnnnnnnnnnnnnnnnnnnnnnnnnnnnnnnnnnnnnnnnnnnnnnnnnnnnnnnnnnnnnnnnnnnnnnnnnnnnnnnnnnnnnnnnnnnnnnnnnnnnnnnnnnnnnnnnnnnnnnnnnnnnnnnnnnnnnnnnnnnnnnnnnnnnnnnnnnnnnnnnnnnnnnnnnnnnnnnnnnnnnnnnnnnnnnnnnnnnnnnnnnnnnnnnnnnnnnnnnnnnnnnnnnnnnnnnnnnnnnnnnnnnnnnnnnnnnnnnnnnnnnnnnnnnnnnnnnnnnnnnnnnnnnnnnnnnnnnnnnnnnnnnnnnnnnnnnnnnnnnnnnnnnnnnnnnnnnnnnnnnnnnnnnnnnnnnnnnnnnnnnnnnnnnnnnnnnnnnnnnnnnnnnnnnnnnnnnnnnnnnnnnnnnnnnnnnnnnnnnnnnnnnnnnnnnnnnnnnnnnnnnnnnnnnnnnnnnnnnnnnnnnnnnnnnnnnnnnnnnnnnnnnnnnnnnnnnnnnnnnnnnnnnnnnnnnnnnnnnnnnnnnnnnnnnnnnnnnnnnnnnnnnnnnnnnnnnnnnnnnnnnnnnnnnnnnnnnnnnnnnnnnnnnnnnnnnnnnnnnnnnnnnnnnnnnnnnnnnnnnnnnnnnnnnnnnnnnnnnnnnnnnnnnnnnnnnnnnnnnnnnnnnnnnnnnnnnnnnnnnnnnnnnnnnnnnnnnnnnnnnnnnnnnnnnnnnnnnnnnnnnnnnnnnnnnnnnnnnnnnnnnnnnnnnnnnnnnnnnnnnnnnnnnnnnnnnnnnnnnnnnnnnnnnnnnnnnnnnnnnnnnnnnnnnnnnnnnnnnnnnnnnnnnnnnnnnnnnnnnnnnnnnnnnnnnnnnnnnnnnnnnnnnnnnnnnnnnnnnnnnnnnnnnnnnnnnnnnnnnnnnnnnnnnnnnnnnnnnnnnnnnnnnnnnnnnnnnnnnnnnnnnnnnnnnnnnnnnnnnnnnnnnnnnnnnnnnnnnnnnnnnnnnnnnnnnnnnnnnnnnnnnnnnnnnnnnnnnnnnnnnnnnnnnnnnnnnnnnnnnnnnnnnnnnnnnnnnnnnnnnnnnnnnnnnnnnnnnnnnnnnnnnnnnnnnnnnnnnnnnnnnnnnnnnnnnnnnnnnnnnnnnnnnnnnnnnnnnnnnnnnnnnnnnnnnnnnnnnnnnnnnnnnnnnnnnnnnnnnnnnnnnnnnnnnnnnnnnnnnnnnnnnnnnnnnnnnnnnnnnnnnnnnnnnnnnnnnnnnnnnnnnnnnnnnnnnnnnnnnnnnnnnnnnnnnnnnnnnnnnnnnnnnnnnnnnnnnnnnnnnnnnnnnnnnnnnnnnnnnnnnnnnnnnnnnnnnnnnnnnnnnnnnnnnnnnnnnnnnnnnnnnnnnnnnnnnnnnnnnnnnnnnnnnnnnnnnnnnnnnnnnnnnnnnnnnnnnnnnnnnnnnnnnnnnnnnnnnnnnnnnnnnnnnnnnnnnnnnnnnnnnnnnnnnnnnnnnnnnnnnnnnnnnnnnnnnnnnnnnnnnnnnnnnnnnnnnnnnnnnnnnnnnnnnnnnnnnnnnnnnnnnnnnnnnnnnnnnnnnnnnnnnnnnnnnnnnnnnnnnnnnnnnnnnnnnnnnnnnnnnnnnnnnnnnnnnnnnnnnnnnnnnnnnnnnnnnnnnnnnnnnnnnnnnnnnnnnnnnnnnnnnnnnnnnnnnnnnnnnnnnnnnnnnnnnnnnnnnnnnnnnnnnnnnnnnnnnnnnnnnnnnnnnnnnnnnnnnnnnnnnnnnnnnnnnnnnnnnnnnnnnnnnnnnnnnnnnnnnnnnnnnnnnnnnnnnnnnnnnnnnnnnnnnnnnnnnnnnnnnnnnnnnnnnnnnnnnnnnnnnnnnnnnnnnnnnnnnnnnnnnnnnnnnnnnnnnnnnnnnnnnnnnnnnnnnnnnnnnnnnnnnnnnnnnnnnnnnnnnnnnnnnnnnnnnnnnnnnnnnnnnnnnnnnnnnnnnnnnnnnnnnnnnnnnnnnnnnnnnnnnnnnnnnnnnnnnnnnnnnnnnnnnnnnnnnnnnnnnnnnnnnnnnnnnnnnnnnnnnnnnnnnnnnnnnnnnnnnnnnnnnnnnnnnnnnnnnnnnnnnnnnnnnnnnnnnnnnnnnnnnnnnnnnnnnnnnnnnnnnnnnnnnnnnnnnnnnnnnnnnnnnnnnnnnnnnnnnnnnnnnnnnnnnnnnnnnnnnnnnnnnnnnnnnnnnnnnnnnnnnnnnnnnnnnnnnnnnnnnnnnnnnnnnnnnnnnnnnnnnnnnnnnnnnnnnnnnnnnnnnnnnnnnnnnnnnnnnnnnnnnnnnnnnnnnnnnnnnnnnnnnnnnnnnnnnnnnnnnnnnnnnnnnnnnnnnnnnnnnnnnnnnnnnnnnnnnnnnnnnnnnnnnnnnnnnnnnnnnnnnnnnnnnnnnnnnnnnnnnnnnnnnnnnnnnnnnnnnnnnnnnnnnnnnnnnnnnnnnnnnnnnnnnnnnnnnnnnnnnnnnnnnnnnnnnnnnnnnnnnnnnnnnnnnnnnnnnnnnnnnnnnnnnnnnnnnnnnnnnnnnnnnnnnnnnnnnnnnnnnnnnnnnnnnnnnnnnnnnnnnnnnnnnnnnnnnnnnnnnnnnnnnnnnnnnnnnnnnnnnnnnnnnnnnnnnnnnnnnnnnnnnnnnnnnnnnnnnnnnnnnnnnnnnnnnnnnnnnnnnnnnnnnnnnnnnnnnnnnnnnnnnnnnnnnnnnnnnnnnnnnnnnnnnnnnnnnnnnnnnnnnnnnnnnnnnnnnnnnnnnnnnnnnnnnnnnnnnnnnnnnnnnnnnnnnnnnnnnnnnnnnnnnnnnnnnnnnnnnnnnnnnnnnnnnnnnnnnnnnnnnnnnnnnnnnnnnnnnnnnnnnnnnnnnnnnnnnnnnnnnnnnnnnnnnnnnnnnnnnnnnnnnnnnnnnnnnnnnnnnnnnnnnnnnnnnnnnnnnnnnnnnnnnnnnnnnnnnnnnnnnnnnnnnnnnnnnnnnnnnnnnnnnnnnnnnnnnnnnnnnnnnnnnnnnnnnnnnnnnnnnnnnnnnnnnnnnnnnnnnnnnnnnnnnnnnnnnnnnnnnnnnnnnnnnnnnnnnnnnnnnnnnnnnnnnnnnnnnnnnnnnnnnnnnnnnnnnnnnnnnnnnnnnnnnnnnnnnnnnnnnnnnnnnnnnnnnnnnnnnnnnnnnnnnnnnnnnnnnnnnnnnnnnnnnnnnnnnnnnnnnnnnnnnnnnnnnnnnnnnnnnnnnnnnnnnnnnnnnnnnnnnnnnnnnnnnnnnnnnnnnnnnnnnnnnnnnnnnnnnnnnnnnnnnnnnnnnnnnnnnnnnnnnnnnnnnnnnnnnnnnnnnnnnnnnnnnnnnnnnnnnnnnnnnnnnnnnnnnnnnnnnnnnnnnnnnnnnnnnnnnnnnnnnnnnnnnnnnnnnnnnnnnnnnnnnnnnnnnnnnnnnnnnnnnnnnnnnnnnnnnnnnnnnnnnnnnnnnnnnnnnnnnnnnnnnnnnnnnnnnnnnnnnnnnnnnnnnnnnnnnnnnnnnnnnnnnnnnnnnnnnnnnnnnnnnnnnnnnnnnnnnnnnnnnnnnnnnnnnnnnnnnnnnnnnnnnnnnnnnnnnnnnnnnnnnnnnnnnnnnnnnnnnnnnnnnnnnnnnnnnnnnnnnnnnnnnnnnnnnnnnnnnnnnnnnnnnnnnnnnnnnnnnnnnnnnnnnnnnnnnnnnnnnnnnnnnnnnnnnnnnnnnnnnnnnnnnnnnnnnnnnnnnnnnnnnnnnnnnnnnnnnnnnnnnnnnnnnnnnnnnnnnnnnnnnnnnnnnnnnnnnnnnnnnnnnnnnnnnnnnnnnnnnnnnnnnnnnnnnnnnnnnnnnnnnnnnnnnnnnnnnnnnnnnnnnnnnnnnnnnnnnnnnnnnnnnnnnnnnnnnnnnnnnnnnnnnnnnnnnnnnnnnnnnnnnnnnnnnnnnnnnnnnnnnnnnnnnnnnnnnnnnnnnnnnnnnnnnnnnnnnnnnnnnnnnnnnnnnnnnnnnnnnnnnnnnnnnnnnnnnnnnnnnnnnnnnnnnnnnnnnnnnnnnnnnnnnnnnnnnnnnnnnnnnnnnnnnnnnnnnnnnnnnnnnnnnnnnnnnnnnnnnnnnnnnnnnnnnnnnnnnnnnnnnnnnnnnnnnnnnnnnnnnnnnnnnnnnnnnnnnnnnnnnnnnnnnnnnnnnnnnnnnnnnnnnnnnnnnnnnnnnnnnnnnnnnnnnnnnnnnnnnnnnnnnnnnnnnnnnnnnnnnnnnnnnnnnnnnnnnnnnnnnnnnnnnnnnnnnnnnnnnnnnnnnnnnnnnnnnnnnnnnnnnnnnnnnnnnnnnnnnnnnnnnnnnnnnnnnnnnnnnnnnnnnnnnnnnnnnnnnnnnnnnnnnnnnnnnnnnnnnnnnnnnnnnnnnnnnnnnnnnnnnnnnnnnnnnnnnnnnnnnnnnnnnnnnnnnnnnnnnnnnnnnnnnnnnnnnnnnnnnnnnnnnnnnnnnnnnnnnnnnnnnnnnnnnnnnnnnnnnnnnnnnnnnnnnnnnnnnnnnnnnnnnnnnnnnnnnnnnnnnnnnnnnnnnnnnnnnnnnnnnnnnnnnnnnnnnnnnnnnnnnnnnnnnnnnnnnnnnnnnnnnnnnnnnnnnnnnnnnnnnnnnnnnnnnnnnnnnnnnnnnnnnnnnnnnnnnnnnnnnnnnnnnnnnnnnnnnnnnnnnnnnnnnnnnnnnnnnnnnnnnnnnnnnnnnnnnnnnnnnnnnnnnnnnnnnnnnnnnnnnnnnnnnnnnnnnnnnnnnnnnnnnnnnnnnnnnnnnnnnnnnnnnnnnnnnnnnnnnnnnnnnnnnnnnnnnnnnnnnnnnnnnnnnnnnnnnnnnnnnnnnnnnnnnnnnnnnnnnnnnnnnnnnnnnnnnnnnnnnnnnnnnnnnnnnnnnnnnnnnnnnnnnnnnnnnnnnnnnnnnnnnnnnnnnnnnnnnnnnnnnnnnnnnnnnnnnnnnnnnnnnnnnnnnnnnnnnnnnnnnnnnnnnnnnnnnnnnnnnnnnnnnnnnnnnnnnnnnnnnnnnnnnnnnnnnnnnnnnnnnnnnnnnnnnnnnnnnnnnnnnnnnnnnnnnnnnnnnnnnnnnnnnnnnnnnnnnnnnnnnnnnnnnnnnnnnnnnnnnnnnnnnnnnnnnnnnnnnnnnnnnnnnnnnnnnnnnnnnnnnnnnnnnnnnnnnnnnnnnnnnnnnnnnnnnnnnnnnnnnnnnnnnnnnnnnnnnnnnnnnnnnnnnnnnnnnnnnnnnnnnnnnnnnnnnnnnnnnnnnnnnnnnnnnnnnnnnnnnnnnnnnnnnnnnnnnnnnnnnnnnnnnnnnnnnnnnnnnnnnnnnnnnnnnnnnnnnnnnnnnnnnnnnnnnnnnnnnnnnnnnnnnnnnnnnnnnnnnnnnnnnnnnnnnnnnnnnnnnnnnnnnnnnnnnnnnnnnnnnnnnnnnnnnnnnnnnnnnnnnnnnnnnnnnnnnnnnnnnnnnnnnnnnnnnnnnnnnnnnnnnnnnnnnnnnnnnnnnnnnnnnnnnnnnnnnnnnnnnnnnnnnnnnnnnnnnnnnnnnnnnnnnnnnnnnnnnnnnnnnnnnnnnnnnnnnnnnnnnnnnnnnnnnnnnnnnnnnnnnnnnnnnnnnnnnnnnnnnnnnnnnnnnnnnnnnnnnnnnnnnnnnnnnnnnnnnnnnnnnnnnnnnnnnnnnnnnnnnnnnnnnnnnnnnnnnnnnnnnnnnnnnnnnnnnnnnnnnnnnnnnnnnnnnnnnnnnnnnnnnnnnnnnnnnnnnnnnnnnnnnnnnnnnnnnnnnnnnnnnnnnnnnnnnnnnnnnnnnnnnnnnnnnnnnnnnnnnnnnnnnnnnnnnnnnnnnnnnnnnnnnnnnnnnnnnnnnnnnnnnnnnnnnnnnnnnnnnnnnnnnnnnnnnnnnnnnnnnnnnnnnnnnnnnnnnnnnnnnnnnnnnnnnnnnnnnnnnnnnnnnnnnnnnnnnnnnnnnnnnnnnnnnnnnnnnnnnnnnnnnnnnnnnnnnnnnnnnnnnnnnnnnnnnnnnnnnnnnnnnnnnnnnnnnnnnnnnnnnnnnnnnnnnnnnnnnnnnnnnnnnnnnnnnnnnnnnnnnnnnnnnnnnnnnnnnnnnnnnnnnnnnnnnnnnnnnnnnnnnnnnnnnnnnnnnnnnnnnnnnnnnnnnnnnnnnnnnnnnnnnnnnnnnnnnnnnnnnnnnnnnnnnnnnnnnnnnnnnnnnnnnnnnnnnnnnnnnnnnnnnnnnnnnnnnnnnnnnnnnnnnnnnnnnnnnnnnnnnnnnnnnnnnnnnnnnnnnnnnnnnnnnnnnnnnnnnnnnnnnnnnnnnnnnnnnnnnnnnnnnnnnnnnnnnnnnnnnnnnnnnnnnnnnnnnnnnnnnnnnnnnnnnnnnnnnnnnnnnnnnnnnnnnnnnnnnnnnnnnnnnnnnnnnnnnnnnnnnnnnnnnnnnnnnnnnnnnnnnnnnnnnnnnnnnnnnnnnnnnnnnnnnnnnnnnnnnnnnnnnnnnnnnnnnnnnnnnnnnnnnnnnnnnnnnnnnnnnnnnnnnnnnnnnnnnnnnnnnnnnnnnnnnnnnnnnnnnnnnnnnnnnnnnnnnnnnnnnnnnnnnnnnnnnnnnnnnnnnnnnnnnnnnnnnnnnnnnnnnnnnnnnnnnnnnnnnnnnnnnnnnnnnnnnnnnnnnnnnnnnnnnnnnnnnnnnnnnnnnnnnnnnnnnnnnnnnnnnnnnnnnnnnnnnnnnnnnnnnnnnnnnnnnnnnnnnnnnnnnnnnnnnnnnnnnnnnnnnnnnnnnnnnnnnnnnnnnnnnnnnnnnnnnnnnnnnnnnnnnnnnnnnnnnnnnnnnnnnnnnnnnnnnnnnnnnnnnnnnnnnnnnnnnnnnnnnnnnnnnnnnnnnnnnnnnnnnnnnnnnnnnnnnnnnnnnnnnnnnnnnnnnnnnnnnnnnnnnnnnnnnnnnnnnnnnnnnnnnnnnnnnnnnnnnnnnnnnnnnnnnnnnnnnnnnnnnnnnnnnnnnnnnnnnnnnnnnnnnnnnnnnnnnnnnnnnnnnnnnnnnnnnnnnnnnnnnnnnnnnnnnnnnnnnnnnnnnnnnnnnnnnnnnnnnnnnnnnnnnnnnnnnnnnnnnnnnnnnnnnnnnnnnnnnnnnnnnnnnnnnnnnnnnnnnnnnnnnnnnnnnnnnnnnnnnnnnnnnnnnnnnnnnnnnnnnnnnnnnnnnnnnnnnnnnnnnnnnnnnnnnnnnnnnnnnnnnnnnnnnnnnnnnnnnnnnnnnnnnnnnnnnnnnnnnnnnnnnnnnnnnnnnnnnnnnnnnnnnnnnnnnnnnnnnnnnnnnnnnnnnnnnnnnnnnnnnnnnnnnnnnnnnnnnnnnnnnnnnnnnnnnnnnnnnnnnnnnnnnnnnnnnnnnnnnnnnnnnnnnnnnnnnnnnnnnnnnnnnnnnnnnnnnnnnnnnnnnnnnnnnnnnnnnnnnnnnnnnnnnnnnnnnnnnnnnnnnnnnnnnnnnnnnnnnnnnnnnnnnnnnnnnnnnnnnnnnnnnnnnnnnnnnnnnnnnnnnnnnnnnnnnnnnnnnnnnnnnnnnnnnnnnnnnnnnnnnnnnnnnnnnnnnnnnnnnnnnnnnnnnnnnnnnnnnnnnnnnnnnnnnnnnnnnnnnnnnnnnnnnnnnnnnnnnnnnnnnnnnnnnnnnnnnnnnnnnnnnnnnnnnnnnnnnnnnnnnnnnnnnnnnnnnnnnnnnnnnnnnnnnnnnnnnnnnnnnnnnnnnnnnnnnnnnnnnnnnnnnnnnnnnnnnnnnnnnnnnnnnnnnnnnnnnnnnnnnnnnnnnnnnnnnnnnnnnnnnnnnnnnnnnnnnnnnnnnnnnnnnnnnnnnnnnnnnnnnnnnnnnnnnnnnnnnnnnnnnnnnnnnnnnnnnnnnnnnnnnnnnnnnnnnnnnnnnnnnnnnnnnnnnnnnnnnnnnnnnnnnnnnnnnnnnnnnnnnnnnnnnnnnnnnnnnnnnnnnnnnnnnnnnnnnnnnnnnnnnnnnnnnnnnnnnnnnnnnnnnnnnnnnnnnnnnnnnnnnnnnnnnnnnnnnnnnnnnnnnnnnnnnnnnnnnnnnnnnnnnnnnnnnnnnnnnnnnnnnnnnnnnnnnnnnnnnnnnnnnnnnnnnnnnnnnnnnnnnnnnnnnnnnnnnnnnnnnnnnnnnnnnnnnnnnnnnnnnnnnnnnnnnnnnnnnnnnnnnnnnnnnnnnnnnnnnnnnnnnnnnnnnnnnnnnnnnnnnnnnnnnnnnnnnnnnnnnnnnnnnnnnnnnnnnnnnnnnnnnnnnnnnnnnnnnnnnnnnnnnnnnnnnnnnnnnnnnnnnnnnnnnnnnnnnnnnnnnnnnnnnnnnnnnnnnnnnnnnnnnnnnnnnnnnnnnnnnnnnnnnnnnnnnnnnnnnnnnnnnnnnnnnnnnnnnnnnnnnnnnnnnnnnnnnnnnnnnnnnnnnnnnnnnnnnnnnnnnnnnnnnnnnnnnnnnnnnnnnnnnnnnnnnnnnnnnnnnnnnnnnnnnnnnnnnnnnnnnnnnnnnnnnnnnnnnnnnnnnnnnnnnnnnnnnnnnnnnnnnnnnnnnnnnnnnnnnnnnnnnnnnnnnnnnnnnnnnnnnnnnnnnnnnnnnnnnnnnnnnnnnnnnnnnnnnnnnnnnnnnnnnnnnnnnnnnnnnnnnnnnnnnnnnnnnnnnnnnnnnnnnnnnnnnnnnnnnnnnnnnnnnnnnnnnnnnnnnnnnnnnnnnnnnnnnnnnnnnnnnnnnnnnnnnnnnnnnnnnnnnnnnnnnnnnnnnnnnnnnnnnnnnnnnnnnnnnnnnnnnnnnnnnnnnnnnnnnnnnnnnnnnnnnnnnnnnnnnnnnnnnnnnnnnnnnnnnnnnnnnnnnnnnnnnnnnnnnnnnnnnnnnnnnnnnnnnnnnnnnnnnnnnnnnnnnnnnnnnnnnnnnnnnnnnnnnnnnnnnnnnnnnnnnnnnnnnnnnnnnnnnnnnnnnnnnnnnnnnnnnnnnnnnnnnnnnnnnnnnnnnnnnnnnnnnnnnnnnnnnnnnnnnnnnnnnnnnnnnnnnnnnnnnnnnnnnnnnnnnnnnnnnnnnnnnnnnnnnnnnnnnnnnnnnnnnnnnnnnnnnnnnnnnnnnnnnnnnnnnnnnnnnnnnnnnnnnnnnnnnnnnnnnnnnnnnnnnnnnnnnnnnnnnnnnnnnnnnnnnnnnnnnnnnnnnnnnnnnnnnnnnnnnnnnnnnnnnnnnnnnnnnnnnnnnnnnnnnnnnnnnnnnnnnnnnnnnnnnnnnnnnnnnnnnnnnnnnnnnnnnnnnnnnnnnnnnnnnnnnnnnnnnnnnnnnnnnnnnnnnnnnnnnnnnnnnnnnnnnnnnnnnnnnnnnnnnnnnnnnnnnnnnnnnnnnnnnnnnnnnnnnnnnnnnnnnnnnnnnnnnnnnnnnnnnnnnnnnnnnnnnnnnnnnnnnnnnnnnnnnnnnnnnnnnnnnnnnnnnnnnnnnnnnnnnnnnnnnnnnnnnnnnnnnnnnnnnnnnnnnnnnnnnnnnnnnnnnnnnnnnnnnnnnnnnnnnnnnnnnnnnnnnnnnnnnnnnnnnnnnnnnnnnnnnnnnnnnnnnnnnnnnnnnnnnnnnnnnnnnnnnnnnnnnnnnnnnnnnnnnnnnnnnnnnnnnnnnnnnnnnnnnnnnnnnnnnnnnnnnnnnnnnnnnnnnnnnnnnnnnnnnnnnnnnnnnnnnnnnnnnnnnnnnnnnnnnnnnnnnnnnnnnnnnnnnnnnnnnnnnnnnnnnnnnnnnnnnnnnnnnnnnnnnnnnnnnnnnnnnnnnnnnnnnnnnnnnnnnnnnnnnnnnnnnnnnnnnnnnnnnnnnnnnnnnnnnnnnnnnnnnnnnnnnnnnnnnnnnnnnnnnnnnnnnnnnnnnnnnnnnnnnnnnnnnnnnnnnnnnnnnnnnnnnnnnnnnnnnnnnnnnnnnnnnnnnnnnnnnnnnnnnnnnnnnnnnnnnnnnnnnnnnnnnnnnnnnnnnnnnnnnnnnnnnnnnnnnnnnnnnnnnnnnnnnnnnnnnnnnnnnnnnnnnnnnnnnnnnnnnnnnnnnnnnnnnnnnnnnnnnnnnnnnnnnnnnnnnnnnnnnnnnnnnnnnnnnnnnnnnnnnnnnnnnnnnnnnnnnnnnnnnnnnnnnnnnnnnnnnnnnnnnnnnnnnnnnnnnnnnnnnnnnnnnnnnnnnnnnnnnnnnnnnnnnnnnnnnnnnnnnnnnnnnnnnnnnnnnnnnnnnnnnnnnnnnnnnnnnnnnnnnnnnnnnnnnnnnnnnnnnnnnnnnnnnnnnnnnnnnnnnnnnnnnnnnnnnnnnnnnnnnnnnnnnnnnnnnnnnnnnnnnnnnnnnnnnnnnnnnnnnnnnnnnnnnnnnnnnnnnnnnnnnnnnnnnnnnnnnnnnnnnnnnnnnnnnnnnnnnnnnnnnnnnnnnnnnnnnnnnnnnnnnnnnnnnnnnnnnnnnnnnnnnnnnnnnnnnnnnnnnnnnnnnnnnnnnnnnnnnnnnnnnnnnnnnnnnnnnnnnnnnnnnnnnnnnnnnnnnnnnnnnnnnnnnnnnnnnnnnnnnnnnnnnnnnnnnnnnnnnnnnnnnnnnnnnnnnnnnnnnnnnnnnnnnnnnnnnnnnnnnnnnnnnnnnnnnnnnnnnnnnnnnnnnnnnnnnnnnnnnnnnnnnnnnnnnnnnnnnnnnnnnnnnnnnnnnnnnnnnnnnnnnnnnnnnnnnnnnnnnnnnnnnnnnnnnnnnnnnnnnnnnnnnnnnnnnnnnnnnnnnnnnnnnnnnnnnnnnnnnnnnnnnnnnnnnnnnnnnnnnnnnnnnnnnnnnnnnnnnnnnnnnnnnnnnnnnnnnnnnnnnnnnnnnnnnnnnnnnnnnnnnnnnnnnnnnnnnnnnnnnnnnnnnnnnnnnnnnnnnnnnnnnnnnnnnnnnnnnnnnnnnnnnnnnnnnnnnnnnnnnnnnnnnnnnnnnnnnnnnnnnnnnnnnnnnnnnnnnnnnnnnnnnnnnnnnnnnnnnnnnnnnnnnnnnnnnnnnnnnnnnnnnnnnnnnnnnnnnnnnnnnnnnnnnnnnnnnnnnnnnnnnnnnnnnnnnnnnnnnnnnnnnnnnnnnnnnnnnnnnnnnnnnnnnnnnnnnnnnnnnnnnnnnnnnnnnnnnnnnnnnnnnnnnnnnnnnnnnnnnnnnnnnnnnnnnnnnnnnnnnnnnnnnnnnnnnnnnnnnnnnnnnnnnnnnnnnnnnnnnnnnnnnnnnnnnnnnnnnnnnnnnnnnnnnnnnnnnnnnnnnnnnnnnnnnnnnnnnnnnnnnnnnnnnnnnnnnnnnnnnnnnnnnnnnnnnnnnnnnnnnnnnnnnnnnnnnnnnnnnnnnnnnnnnnnnnnnnnnnnnnnnnnnnnnnnnnnnnnnnnnnnnnnnnnnnnnnnnnnnnnnnnnnnnnnnnnnnnnnnnnnnnnnnnnnnnnnnnnnnnnnnnnnnnnnnnnnnnnnnnnnnnnnnnnnnnnnnnnnnnnnnnnnnnnnnnnnnnnnnnnnnnnnnnnnnnnnnnnnnngatcttgcatttagaaaatcataagaaatttactaaaaagtattaggactcatgaacaaatttaagaatgtaacactatataagattggtatacaaaaataactgtacttcttcaccaagaaatcaagaatccaaaaatggaattataaaaataaatcttgttacaatagaattaaagctggggaagcttaaacttgaacactaaaaactacaatacatggttagcgttggaaacacccagataccatccctgagccttctctccttggctctgagggctttaccttcacggggtgaagaaaggggttgcattcttggcttttacattatattaggtgggttcgggttgaggtatctgcaattcaaatgagtattatatactctacttttatggataagagactgaggcccaccaagagagggaatgacagtccatatcctggaaggtgaattatcaggcactgatttccgctatttaacccctgccaatcatcaagtatttaaaggatccccggataccataccaataggtgttcaagagagaagcctgtaatctaggcgtctgagaaaacaaggctagagattccaatattagagacaacagggctctgggaagattaaggttgagttttctggatctgcagaatagagtcactgaggaccaattgcaagatcagaggagatgaaagaacaagtcaaggcatgcttaggaaaagagaatatcagggataggttttaggcaagagtcacactgaggaagggcaggttcttggcgtcgctcaggaagaaatccaaaagcaagcctgtggtggaagaaagcagctctacggaggcattggcggtgttacagccctgcatccactccggcagggcagggtgccctccgtgggttgtgctcccagagcagcagcctaggggtggcttgtagtcatttttataattcacttttaatggcatgctaattaaggggcaggttattcagaaatagctagaaatgggcagtaacttccatctgtttccatggcaaggggtggggacttctcatgatgccatggcattggcaaactgtcatggcactggtgggagcgtcttctggtgatctgaggcgtgaggtgctttcgctgcctctcccaggttcctctgtgcctcttacctgaaagcccatcaacaccctcatctgcccacctacaaacgtcactgccctttcaccccacccccgtttcacatgcactcccacatcaaccctgagcattcaagcctgcgtttccctgttaggaacctcggtggtagccggagctctgagaaatccctagacagaactccttgcctaggttgtggcagaaatcagggaaggaaaggcaaatttcaggtctttctcacaataaataaataaagataggtagatttgattgatggatggatggatggatgaaacgtgggagtctatgggcaaatatttatcagacactggaagtgaaagttgtcacaaagattatggagtgcacctgtcttatgaccctgttattttatcctagtatatgcactagagcatattttctaactgtgtaattgaaggctcacaaattagtttagtgagagaaaagataacggattggaagagaattaccatattcattagttgtgtttttaaaattttaaagtaaaatagaggcatgattgttttcatgctttcgaatgcatctataaaaaatagacttgagggctgggcgcagtggctcacgcttgtaatcccagcaccttgggaggccgaggagggcggatcacgaggtcaggagttggagaccagcctgaccaacatggtgaaaacctgtctctactaaaaatacaaaaattaggcgagtgtggtggcgcacgcctgtaatcccaggtacttaggaggctgaggcaggagaatcgcttgaacccgggaagcggaggttgcagtgagccaagattgcaccattgcactccagcctgggcgacagagtgagactccatctcaaaaaaaaaaaaaaacttactcattcatagcatagaccaattggcctctattgaaatttctccattattttcacaatgtcccaggctgtgaaaccaggatttaataaagaaccagaatgccacatctgtgtcacctgggtagggaccagtcctgatacattaagtccgggtctctgtgtaactggactcaagtgctgggcaaaacagaatgtccggcgtgggttcctaacgggggaccgcaaagcctcatgggaattgtggtgtcaccttccaatgatgttaccatcaaggaccttgggaaccagcttttctctctgcgcatgcgccgcccggcccactccgccattttcctccggaagtgtggcacccagagtcggtcctgtagctgggccggcttggggcttggttctatgtccctgtgggtcggtgcaagggccaagaggaacccgtaggcctcagggaatcccagggggccggaccagtgttccctagttgtggaagcagacgcatgggcgaatcgcgggagggcagggcctgaagagcaggtgcgggccacggacccaggcggaggctgggaggacaggcgtggggtcccagcagtgaagcgggttctagaggcacaggagcgggtaggagaggccagtggccctaggcccagagtctgcaggccgcgctcctgtcctgccgctgagggacacggttaccaaccagcatgatgctcagtttgcccatctgtcccagtgctaacacacagttctcaggagactttccccattcccagaggagtagtgtgaaacgcgtgcgccgctagtcttaaacttggtgtttgtattagttgggtttcctggtgtctctttagcaagtgaagtttctggttccctccttcactgtgtgacctgcctagtcctcctgggtcgcatttacagaagtttatacgagacctagtttccagggaagaactcactgattccacaagggagatggcataatagatgatggtcgtcagccttaagggtacttcagtcttaactgtgtgttacaaagtttgaaagggagggttccctatgaataagaagcacacttgaaagaacagccatctggtctaacctctcactggtgcttcagaggaggaaaaaaggtcacaggtgaagatcccagttttccttgctcaggaaatattaattctactccctagaatgcacaagatttgcaaagactaggtgatagtagaaggtttggacgaactttcagaaggttgaggtgaattcagctgagaagaacaggcaaggacttaggaaatattccttatttgaaggggcctgaaagtgtggtctggggtacagcagtgacctgtcatacttgagaggattaaaatactctccaaacacagtcccattccttcaatcttagctcgttttttcgcgtctgagatatattaaacctagtccatccccaaatttagcattagattgcgaagttctattgattgtatttgatttgtaatttaagattttctccccctacataattttgttaaaaacacagaagtgaattctgttcacttaggtgtaacagttaatacttgctgtttaaggaactaattaaaccttactggcttataaaaaacaatcaccattttatttgtatgaagttctgtggatctgcactttggtgtggtggattcagctgggtagttgatatatttgtgttgcctggattacaaaaaggccttagtcacctggtgcgttgactgagcctggttggtttaagatagtttccttcacaatctggtggtttgtggtgactcttggctaggccctgtgtctccaacagggtagctccagacctcttcaaaatttctcccaaaaagggaagaaccaatggatatttgcatcacattttccattgtccattcactggacaagtcagatggaaaagcccaatttattgtcagagcataatatgagggcttggatagaaggaaaggtgttattgggaaacatgagtagaatggtgtactgcaggaaatacatattatgtacattttaaaaaacgtaattgtaggccaaaattgctggtttgcaagatgcactttccacgatgttcaggtatagaaaagcaagaggtactgtcatgggaacactcatatgaagttatttgtggaatctacatattaataggaaaatagttaatacagcccagtatatttctataacatttattttagtgaacttataatgtttctttgtattaaattattagattatatctttagataatattgttactaaattagtaggtaatacatatttttattcaaaaataaattgtgcatctaatgtctaccaattaatgtacttgtctatgtatcttatcttaacttgagcctctgctgcccctaatgaggcgtgaaggactcttctcccacggggaagtttttctttttcaggagggaggagggctttcccaggtaatgtgtctagagcattgggcagaagaatctgggaccacaccacaccagttctctccttaatccacgtcatttgccttctatcccagctatgtttccagtgtcctctgggtgtttccaagagcaacaagaaacgaataaatatctggtgagttgtttacttgttcttcactttgttttacactgtattttctgagtttatgggtgtctgtgaattaaaaaggaaaagtagaaataagtaaaactcaggttgaaggaaatatacataaataagataaagctgacctgtagatataggcaggttataagagcttagagttgtctaagttgggtggaaattttcctctgatctttctgatgccgagacaaaaaaggcagtcatatttgttacgtgattggaatggaacccgagaagagagcatgcagtgttcttgtgggacaggaaagcttgtgtgtaccaagtccgaaccaccaccttcattggtgacatagattatgtgctggaacatatttcacaccggcctggcattaaccacttgtagtgttgtgcagtggaaacggtcatcttccgctaaagcacagcttccatcgtaagttgtgctcattgctcaaagagtgtggtcccaaacagcttttgggaggtcctccttgattcatggatgaaacccagaacatcttgagtactgagttaaccataggtccttaaataactctccagacatttttcttagtttatctctacatgcagggtgtgcagcagcctgttcaaagtcatattttctgggaaatatttccagtgtttatttgcactttagcccactctttgtagtcttaacttatttcttctaaactcaccattaacgtaaataatagtcaaatttagggggactgtatttgccttactcaagtcttctaccatagttgaaactgtcgtacccgagtgatttagagataaacgccacactttgagacgaattcaggggtcctttattagctggtgactgagagacagctaacgcacgaaattctctcggccccgaagaagggacaagattttcttttatactttggtttaaagaggggaggggggattctagctgcagcaactttacagaagataataacagacaaaaaatttaaaaagacagatggttacaggaaaacaaactgttcccggtgcaggggctttaaattcaccacaaagtgataggtgagggggctctgggcaatatctgccagacaaatgtggggctttatgatactatctctgaataaattgctgggaactgcagacatcgcttgtctcagcactttatcagttaattccactctttgatatgttgaaagtcagcttgcacaagttaaagtccttgaggaaagggggtgggtagggagcccttgatgtcttgtaaatgaaggagccaaatggagtttgtctggttttctcagctaagggagagtctattcatattaaaaacaaggttagctatctaaggaagagtctattcatgttacaacgttgggtattacaaaacatctgttcatgatctggaaattcttctgtgttagttctgttaaaagaaaaactttaaaggagtttaatagagtaataaacgattcacgaatcatgcagtccccagaatcacagcagattcacagagactccagcgcagtcatgtgatggaagaagatttatagacaaaaggaaaatagcataccgaaatcggaagtgaggtaccgaaacaactcagtgtttgccttgtttgaacacattttgaacatttggcagtgcctgagtggttgaagtttggtcattgggattggccaagatgtagctgttgttccaggtgcatactcttaagttagtttttcattcttgtatacctattaaggtaggttacagttcatccacaaggactcatatatagaattatggagtccttctcaggccatacttagttcactttaacaatgccttccctttggttattttctcaattatgagagattggccaaaacttcagtcactggtgtgactattaccattgcaaatgtacttacttggtttagaaacccactgggaaatagaccagtgagatttgaaaaggtggaacaaggacttgagtagaaggtatcttcttatgctggaacatcctgtttacaggagaaaaacaaaacctagtttgttctaggatttatgtgtttccttaaagtcttagtttgattatgttacatttagcatgagtgactccattttggtttggtttggtctgttgggacctattgcatgagtttagttcaaaacaatggcctcccataattttgcttaaaaaaattcctccttttggctgggcgcggtggctcacacatgtaatcccagcactttgggaggctgaggtgggcagatcacgaggtcaggagattgagaccatccttgctaatatggtgaaaccccatctctactaaaaatacaaaaaattagcgaagtgtgttggtgggtgcctgtagtcccagctactcaggaggctgaggtaggagaatggcctgaacctgggaggcagagcttgcagtgagccaagattgtgccactgcactccactctgggggacagaccaagactctgtattagaaaaaaaaagtcctccttttcagtcaagttctcacttagttgagagtgtgaccaaaatgtagggccttagcatcactcttagttaccactgttttgggtttctggtttagcaggatgatcccattgttttgggttctggttttagcacgtcactcccattgttttgggtttctggtttagcaggatgatcccattgttttgggtttctggttttagcacgtcactcccattgttttgggtttctggtttagcaggtcactcccactgttttgggttccggttttagcacgtcactcccattgttttgggttccagttttagcacgtcactcccattgttttgggtttctggtttagcagatcactccaattgttttcggtttctggtttagcaggatgctcccattgtttggggtttctggtttagcaggtcactcccattgttttgggttccggttttagcacatcactcccattgttttcatttccggttttagcacatcactcccattgttttgggttccagttttagcaagtcactcccattgttttggattctgattttagtgttcgtcacccccattgttctgggttccagttttagtatatcactctcattgttttgggtttctggtttagcacgtcactcccattgttttgggtttctggtttcgcaggtcactcccattgttttgggttctggtttaagcacatcactccccttgttttcgtttccgcttttggcacgtcactcccattgttttgggttccagttttagcaagtcactcccattgttttgggtttctggtttagcacgtcactcccattgttttgggttctggttttagtgcacatcactcccattgttttgggttccagttttagtacatcgctcccattgttttgggtttctggtttagcatgtcacccccattgttttgggtttccggtttagcatgtcactcataggttacggtgtccttatggttgcacttttttttaatctcttgtcattccagttgaagagataccatttgatattttagagatgcctgcatgcaaactcttaaaacatttgagtaagtacagtgcaccagggagactcttatgactcttgggataacaccaagaatttggtatatgctcctaactcagggtccccataaatcaaaccacctaaaatcaaatagattaaagaatgaattagataaagagtttacttgcttaactaagtgggtttttttgttaattccctacaaccaaatctttataatacaccatgttttctccacatgctgtaagtgttagcagctgcacagatacttaagataagtgtctcatgatagtagagaagtcttgatctgtgatcttgggaaaagctgttcacattaaggatgccatcttcttctggggggaactgtccttgttagctttaccttaagggttccaatgggcatatggttccgagtgtggagggacccttctgagttgtgagactatgaacccaaagtttaaggttttaaatttttgctgtcatgtggatggcaagggcagtccttctctgatgttctcagaagatccagtcatcagattctagattttgaagggtttgactgtcctcagtgaaccataaaaggctttctttacctggtgaaaatacacttcagggtaattatctactgttttaacatcaattctctcgcatggaagtttttatacaatcagaaaacatgcactgaaaatgaaaactgaatgaaatccctttataaaatgtttaaatggcccatcaggtaaccaaatgtacctgaagttttgattgttttcctagaaatatagtattgacaaaccaaacattggttataaactattttagcagtttagaaatcaccacaccaatatatttaatttggatcattttctctttccatgatgagttatggaatgcagaacttttaataacaaaagttttaaggacttaagaaggataaggtggccatcctggttcttcataagtctgtgcttaattaacattagacttacatcctcttgaataccagctgtttctccaaattaggtgcatggcactggtaactgatgagtagttataggtgatttgacttagaccatggagattatttaaattatatatctaatcaatttcaatattggtgatttagcatgcaaatgtggcaaaatatttccttggtatacaatttttgttttacttaggttagcagttttataaaccagttggtctttttattaaatttttgggatttttttttgagacagagtctcactctgttacctaggttgtagtgcagtggcacaatcttggctcactgcaacctccacctcctgggttcaagcaattctcttgcctcagcctccagagtagctgggattacaggcacataccaccacactcagctaatttttacatttttagtagaggtggggtttcaccgttggccaggctggtctcaaactcctgacctcaagtgatccactggccttggcctcccaaagtgctgggattgccgacgtgagccgctgcacccagcctaacttttgagaattcttaacctgtccaattcttggggtatcagggaacttatggggaatttttacccatgatattaaagttattaaaaatctgtgttcacgagtgtttttcaggatccttttcattctttcatgaatcttctaagagacaccatattctagaattttgcatgcttgtgaagtttttagaaactgcatcaccattaagcaattaactgtggaaatgactttaaatagttatagataaagacaaatgacaaggaaatttggttatttctgtggtctacaataacttaataaccataattagggtggatgtggtggctcatgcctgtaatcccagctctttgggaggccgaggtggaaggatcatgaggtcaggagatcgagaccatcctggctaacacagtgaaatccgtctttgctaaaaatacaaaaattagcctggcatggtggtgggtgcctgtagtcccagctactcaggaggctgaggcaggagaatggcatgaacccgggaggtggaggttgcagtgaactgagattgcaccactgtactccagcctgggtgacagagaaagactccttctcagaaaaaaaaaaatacaagaattttagaaatcctatacaattttagaatggattgatgacacactgaatataacctaaagaaggttcaacattattttttattttgacagtgctagccatgtgaattaacatgttaaatagtcctgtttacctctcttttgggtgcttcaggggcctctgtagtatcccaaagttagaggtcagaacataaaattttgaagatgcaatttgattttgggaagcctattaaatatattaaaggtttaaacacttgatgttatgaaatagaattccacgtcaacgtaagtcattcatttacctaaaatcatgacttaaaaaatttttaaagggcaaaaatctttactcattgatagggggaagacttatctccacaaataatctgcctcttgtttttccttttttttttggtaatttatttacaaggcaaacaaatttttcattattttattttatcattactattattattattatactttaagttttacggtttatgtgcacaatgtgccagttagttacatatgtatacatgtgccagtctggtgtgctacacccattaactcgtcatttagcattaggtatatctcctaatgctatccctcctccccctgcccaccccacaacagtccccagagtgtgatgttccccttcctgtgtccatgtgttctcattgttcaattcccatctatgaatgagaacatacagtgtttggttttttgtccttgcgatagtttactgagaatgatgatttccaatttcatccatatccctacaaaggacatgaactcatcattttttatggctgcatagtattccatggtgtatatgtgccataatttctcaatccagtctatcgttgttggacatttgtgttggttccaagtctttgctattgtgaatagtgcggcaataaacatacatgtgcatgtgtgtttatagcagcatgatttatagtcctttggttatatacccactaatgggatggctggatcaaatggtatttctagttccagatacttgaggaatcgccacactgacttccacaatcgttgaactagtttgcagtcccaccaacagtttaaaagtgtttctatttctccacatcctctgcagcacctgttgtttcctgactttttaatgattgcgattctaactggtgtgagatggtatctcattgtggttttgatttgcatttctatgatggccagtgatgatgagcattttttcatgtgtcttttggctgcataaaggtcttcttttgagaagtgtctgttcatatccttcacccactttttgatggggttgtatttcttttcttgtaaatttgtttacgttcgttgtagattctggatattagccctttgtcaaatgagtaagttgcaaaaattttctcccattttgtaggttgcctgttcactctgatggcagtttcttttgctgtgcagaagctctttagtttaattagatcccatttgtcaattttggcttttgttgccattgcttctggtgttttagacatgaagtctttgcccatgcctatgtcctgaatggtaatgcctagttttacttctagggtttttatggtttcagttctaacatttaagtctttaatccatcttgaattaatttttgtataaggtgtaaggaagggatccagtttcagctttctacatattgctagccagttttcccagcaccatttattaaataggggatccactccttgtttttgtcaggtttgtcaaagatcagatagttgtagatatgcggcattatttctgagggctctgtgctgttccattggtctatatctctgttttggtatccgtatcatgctcttttggttactgtagccttgtagtatagtttgaagtcaggtagggtgatgcctccagctttgttcttttggcttaggattgacttggtgatgcagacccttttttggttccatatgaactttaaagtagttttttccaattctgtgaagaaagtcattggtagcttgatggagatggcattgaatctataaattaccttgggcagtatggccattttcatgatattgattcttcctatccatgagtatggaatgttcttccatttgtttgtatcctcttttatttcattgagcagtggtttgtagttctccttgaagaggtccttcatgtcccttgtaaattggattcctaagtattttattctctttgaagcaattgcgaatgggagttcactcatgatttggctctctgtttgtctgttattggtgtataagaatgcttgtgatttttgtacattgattttgtatcctgagactttgctgaggttacttatcatcagcttaaggagattttgggctgagacaatggggttttctagatatacaatcatgtcatttgcaaagagggacaatttgacttcctcttttcctaattgaataccctttatttccttctcctgcctgattgccctggccagaacttccaacactatgttgaataggagtgatgagagagggcatccctgtcttgtgcccgttttcaaagggaatgcttctagtttttgcccattcagtatgatattgactgtgggtttgtcatagatagctcttattattttgagataagtcccatcaatacctaatttattgagagtttttagcatgaagcgctgttgaattttgtcaaaggccttttctgcatctattgagataatcgtgtggtttttgtctttggttctgtttatatgctggattacttttattgatttgtgtatattgaaccagccttgcatcccagggatgaaacccacttgatcatggtggataagcttttttatgtgctgctggattcggtttgccagtattttattgaggatttttgcatcaatgttcatcaaggatattggtctaaaattctctgttttggttgtgtctcttcccggctttggtatcaggatgatgctggcctcataaattgagttagggaggattctttctttttctattgattggaatagtttcagaaggaatggtaccagctcctccttgtacctctggtagaatttggctgtgaatccatctggtcctggactctttttggttggtaagctattgattattgccacaatttcagatcctgttattggtctattcagagattcaacttcttcctggtttagtcttgggagagtgtatgcgtggaggaatttatccatttcttctagattttctagtttatttgtgtagaggtgtttgtagtattctctgatggtagtttgtatttatgagggatcagtggtgatatcccctttattatttttattgtgtctatttgattcttctctcttttttctttattagtcctgctagcagtgtatcaattttgttcatcctttcaaaaaaccagctcctggattcattaatattttgaagcgtttttttgttgctatttccttcagttctgctctgattttagttatttcttgccttctgctagcttttgaatgtgtttgctcctgcttttctagttctttcaattgtgatgttagagtgtcaattttggatctttcctgctttcccttgtgggcatttagtgttataaatttccctgtacacactgctttgaatgtgtcccagagattctggtatgttgtgtctttgttctcgttggttttaaagaacatctttatttctgccttcattttgttacgtacccagtagtcattcaggagcaggttgttcagtttccatgtagttgagcagttttgagtgagtttcttaatgccgagttctagtttgattgcactgtggtctgagagacagtttaatttctgttcttttacatttgctgaagagggctttacttccaagtatgtggtcaattttggaataggtgtggtgtggtgctgaaaaaatgtatattctattgatttgggttggagagttctgtagatgtctattaggtcctcttggtgcagagctgagttcaattccttggtatccttgtgaaatttctgtcttattgatctgtctaatgttgacagtggggtgttaaagtctcccattattattgtgtgggagtctaagtctctttgtaggtcactcaggacttgctttatgaatctgggtgctcctgtattgggtgcatatatatttaggacagttagctcttcttgttgaattgatccctttaccattatgtaatggtcttctttgtctcttttgatctttgttggtttacagtctgttttatcagagtctaggattgcaacccctgccttttttttgttttccatttgcttggtagatcttcctccatccttttattttgagcctatgtgtgtctctgcacgtgacatgggtttcctgaatacagcacactaatgggtcttgactctttatccaatttgccagtctgtgtcttttaattggagcatttagtccatttacatttaaagttaatattgttatgtgtgaatttgatcctgtcattatgatgttagctggttattttgctcgttaattgacgcagtttcttcctagtcttgatgttctttacaatttggcatgtttttgcagtggctggtaccgattgtgcctttccatgtttagtgcttccttcaggagctcttttagggcaggcctggtggtgacaaaatcgctcagcatttgcttgtctgtaaagtattttatttctccttcacttatgaagcttagtttggctgaatatgaaattctgggttgaaaattcttttctgtaagattgttgaatgttggcacccactctcttcttgcttgtagagtttctgccgagagatcagcagttattctgatgggcttccctttgtgggtaacctgacctttctctctggttgcccttaacatttttttcttcatttcaactttggtgaatctcacaattatatgtcttggagttgctgttctcgaggagtatctttgtggtgttctctgtatttcccgaatctgaatgttggcttgctttgctggattggggaagttctcctggatgatatcctgcagagtgttttccaacttggttccattctccccgtcattttcaggtacaccaatcagacgcagatttggtcttttcacatagtcccatatttcttggaggctttgttcatttctttttattcttttttttctaaacttcccttcttgcttcatttcattcatttcatctttcatcactgatacgctttcttccagttgatctcatcatctcctgaggcttctgcattcttcacatagttctcgagccttggctttcagctccatcagctcctttaagcacttctctatattggttattctagttacacattcgtctaaagttttttcaaagttttcaacttctttgcctttggtttgaatttcctcctgtagctcggagtagtttgatcgtttgaggccctcttctctcaactcgtcaaagtcattctctgtccagctttgttccattgctggtgaggaactgcattcctttggcagaggagaggtgctctgctttttagagtttccagtttttctgctctgttttttccccatctttgtggttttatctacttttggtctttgatcatggtgatgtacagatgggtttttggtgtggatgtcctttctgtttgttagttttccttctaaaagacatgaccctcagcttcaggtctgttggagtttgctagaggcccattgcagaccctgtttgcctgggtatcagcagtggtgtctgcaaaaccgtggattttcgtgatccgcgaatgctgctgtctgatcgttcctctggaatttttgtctcagaggagtacccggttgtgtgaggtgtcagtctgcccctactggggggcgcctcccaattaggctgcttgggggtcagggtcagggacccacttgaggaggcagtctgcccattctcagatctccagctgcatgctgggagaaccactgctctcctcaaagctgtcagacagggacatttaagtctgcagaggttactgctgtctttttgtttgtctgtgccctgcccccagaggtggagcctgcagaggcaggacggcctccttgagctgtgttgggctccacccagttcgagcttcctggatgctttgtttacttaagagagcctgggcaatagccagtgcccctcccccagccttgctgctgccttgcagtttgatctcagactgctgtgttagcaatcagcgagactccgtgtgcgtaggaccctccgaggcaggtgccggatataatctcctggggtgccatttcctaagcccgtcggaaaagcacagtgttagggtaggagtggcccgattttccaggtgccgtctgtcacccctttctttgaccaggaaagagaactaactccctgaccccttgcacttcccgagtgaggcaatgactcgccctgcttcagctagtgcacagtgcacttcacccactgtcctgcacccactgtctggcactccctagtgagatgaacccagtacctcaaaaggaaatgcagaaatcacccgtcttctgcgtcgctcatgctgggagcggtagactcgagctgttcctattcggccatcttggcttctcctcccattattttttaatattttctgaaaatcttctttaaagagagaaagccaaatgtcacccactttttcataaaaccttataggcaaatctattattctttcctttttttgaggtggattttccctcttgttgcccaggctggtgtgcaatgatgcaatctcggtttactgcaaccccctgcctcccaggttcaagcaattctcccgccccagcctcctgagtagctgggattagagacatgtcacaccatgcccagctaattttgtgtttttagtagagacggggtttttccttgttggtcaggctggccctgaactcctgacctcaggtgatccacctgtctcggcctccccaagtgttgggattacaggtgtgagccactgtccctggccattttttttaaagataacgtcttgctctgtcaccctcctcaccatattatagctctggggccaaactgcatcacaatgataatcatggagccacaagaagaatccactcagctttgtaagatgctgcccaaggggttgcttggagtaaccaaattaacatttttcattctgctcagagcaaaatacatgtgacaaaacatagacacgtgccactttgcttagcacccagtgtcaaactggtaagacccaaacttgctctcagataggccgtgccacctctaaatctttttagaagcttctgcatattaataggcatccctagacgagactaatttgggagccctcatttttaaatgcacttcagggcattattcatttggaatgttccactgtaagttatctttagtaagattttgccatttctgtaagactttgctgcttcccaggcctaatgaattagccagaaggaactaagttttccagaaattaatgatcctattgttacctaatatattgtctttactcccaggttcccttgattgacttagccaatgattttttttcctacctaagcgtgcgaggaaaatgaaacaaaggggtagaacacaaaaatccctgtgaattttcaaaagccaaattttacaaccctccaaaattatcatttactaccactttccttctgacccattcagatgtaggaggtctctaactggaactggattcaagacagttaactactggatcaaatctgatcctggacactgtcccgtttctggatgttctaaaacatccagtcagtcatggctggatagcagtttggaacagaaaattgctcaaagaaactcagagctcaaaacacaaatccatggagctatgaaatccgagagagaatttaccatgatccccagctgctctgagaggtcaaagtgcacaagtgttacagaatcctgagacgtcacttttctgcctgaaacctctggctggtggtgcctttacctgtgttttgctcgggcccactgggttcgttctgtccactcggctcatgctagtggtgtggatcccacacctgccaaggatgagctgggtacagagcagtgaatggtgtgtgagcaagcaagcatgggatctgaccactgcacacagccaagcatgccagctgcagtggggtgggcagctccaggtaccggcacaggtgccagctccctgtgaggctgcagctggaccagaccgactgcaaacagcttccactgtgtgtatcagggaatgcagtggtgcctggaaacttggagatgcaggaactgcagagccccaaagaaggcatcacagccctggcttggggagctcctaggtctgggctccctgaagggccacagctcttgtctccttctctcttctcttcttcttgcctgcaatttggtaagcaaggggtgcgtttcagccctgtttatgttacacctctttcagccctgctagttggcaggtcccgagttcttgtcctgagtccaggaagaatgaggtatgtgggcaagtagaaggtgagcaaggtgaagaggtgctttattgagcaacagtagagctcagaggagaactgcagtgggtaactcctttctgcaggcaggtcatcccaaaatctgttcagctctcagcagctgagagagacgcactgtggttagctgttcccacattgctgaggctgttcgagctgaggagtgccttcaggccagtgctgagccactcttagacccacctcaacctccctcttgtgctcgtcactgcccaaagtctggagggggctgaggtggcaggaggctggcatgtcagcactgccctgagcttgcacaaaccgggccgggttgcgactgtgcctgggttcagcctcaacttggatccgaagttggagtgggctctgggagtggagagatgccagatggtgggaccaggtacgactgagcctgtgggggcagggggcttgctgggcctctaagagtgcaaagatgcccgggtttgcagtcatggctggatggctgcagctgtgcctgggagggcggggctcctgcttgccaatttagaaggggtggggctcccacccgttcctggctcccaccagcttcgaggagcgcacagccccagccactcctccccactgcagccagtgtctccgtagcaactgctccacgtggaccactgctgccatcacagagcagtccttgcaggtgcctttcttgtacctcagcactcctgggggtcattagaagccctagcaacactgctcaccacactatagctccggaggccctagcagtcctgctcccacagatcccacttctgacaccatctattaaaagaaaatcttcagctgaattaaatttaaaggaacttaattgagcaatgaatgattcacgaatcaggcagcccccagaatcacagcagatttggtgagactccagcacagctacatggtggaagatttatagacaataaagggaacgtgatgtacagaaatctgaagtgagaagtgaggtccagaagcaactgggtcccttacagttctcagcagtgaggtccagaaacaactggactggttccagtgctcagcatttgccttatctgaacacagctgaacactcagcagtgtgtgagtggcagaagtttggcagttgggattggccaggactcagctatagttacaggcgcatactcctaagttaggttttcagtctttctacctattaatttaggttgcagtttgtccacagggactcaaatctagaagtacagagtccttcccaggccatatttagttcactgtaacagtttctattatgacctcactgacagttctttttctctgaattctcctttcttctcaacagcttatccaaatgttccattagtccctgttcatcccgccctgcagttctccttgactgattcagccctttgtggtttgcagtcctgtttctctacagcttggaccccttcagtctttccatcataggtttaactctctgttgaatgcttctttgtagctacacaaaatttaccttaagctcaaaaaattcaaactgaaagccacatcctcttctcttcccttatgtgtatggtattactaccatgcagccagtgacccaaaatgggatttcttctgggcttttcttgcttagattcaggctcatctggtgtcaagccttgttacttttgtttccttgttcttttatttttaattttttttttcttttgagacagagtttcactcttgttgtccaggctagaggacagtggtgtgatctcggctcactgcagcctccacctcccgggttcaagcaattctcctgcctcagctcctgagtagctggtattacaggcatttgccaccatgcccggctaattttgtatgtttagtagagatggggtttctctgttttgatcagggtggtctcaaactcccgaccacaggtgatccacctgcctcgtcctcccaaagggctgggattacaggcgtgagccaccgagactggcctgcttgttgttttcatctcatcctgatttctgaatacaggagaggagctgagttggtgttcactaacaagcacggaagctttgttacatttacagtgtcattcttggcaaaacctgaatggtatgtttgtggggtgatgagattcagtcccctgtgacctgtgcatctggccaacactgtggtgacatccttaggaatcaatggggagggagaaagtattcaggagttagtgggtcacatttgacaagggccaataaagaaatatgcaaagacaaaaatcaagaagaacattgtcatatgttacacctttcgtttatataaatttatgtcaatgattctagcttatgttaatatgcaatgtatacaatatgctaacatatacaatatatgtttatagtttaaacatttctgtcatgttttcagattctttaaagattatattacgcttcctatttcagatagctgtttaaaatgagtaaggagaaacggatgtgtgcatcagttctaactgtttatggactaaaactagttgatttcttggttaagaacaaaaagtgacaacctaattaactgaaaattttaagtaggcaattatagttttagctttaacgtaaaatattaactatgctccattcttgcatttttaacctaatactcaatataaatcgctacatgccgtttcagatcaaggttctacttgtgatctctcatgagtttttcaaggttttaattatctgagatgtaacaatgtaccagtaaccttactggcttaaaccaggaatttatttttttacatgtcacaattttctgggtcaagacactggacagggcggtgtgggttggttgcttcatgatgtccttggtctcatctggaaggactctagtggctggggacatggaacaggcacccagccctctcttcgtggccagcacggacttcctcccagtctggcagcgtcaggtagtcaggtttgtctggtttctcccagggtgtgtgtcccagaggcccaggcagaatctgtaaggcctctcatgatcgcccctcagaagtcccagagcatctctcctgccacactgcccagtcgcactcatcactgaggccagccatgattcaagggcggaaggtgattagattccacctcttgatgagaagcatagtaggaacctgcagcagtctttaataaaccacagcttgtcctctggtcgcaaactattaacatttctgctacatgcaaattatgctttgcccctctcaagagccccagaatggttttccttatggcactggctggtagcccaactgaatcctgaatcaggttgtggtggcctgtcatctgcaccaacacacacacagctgcagtgaggactgaatcaggttgtggtgacctgtcatctgcccctccccccgacacagcaacagtgtggactgaatcagattgtggtggcctgtcatctgaccccccacacacagccacagtggggactgaatcaggttgtggtgacctatcatctgagcccacaaactcagccgcagtgaggggactggtgtgaaaacagtcggcatttccctttagaagctgttggtgggaggcaagaaggaagtgctgccctgcaggccccgtctaacagttggtcattcccatggggtgcctgttacagttctgtgattagtgcccagtcctggtccctgagaacggcgcccagtcctggtccctgagaatggtgtttgtgtcctttttccttcagtgcctgggttgcctttgaccaagtttccctgcctttttcttatggtcaatagggtattcaatggcttctttttcattttttttccttttcttttctttcttttttctactttggccttttgagacaagaaattatttctttatattttctctaaattctgtttgaaaactgaacctccttgtttagatcatgtccctctcctgtcatatttattcagtgacagttaggggaggctggtagcactttccatgttcttcccagatgtctccttaggcagatccctgagatggtgcagtgccctttcagtttccatgttgtggccgtagttttcccacagtccctcagcacgtaactctcaggccttttctccagtttccaatgacattttctcaccatccttcaggccctgaccaagagtcttgatgctcttccaggttgcatgaatggtctccttgaggcccagttacaggtcagcctcacagtcgtgtcacatattgtagcttctgattaccacagcagctcatttccagcggtcatattctgttccagttttctattctgaagaaaccatccccaaaacttggcagcttaaaacaactcattattacttgttttttggctttgagagtcttggtggtcagctcatctcacacacagttgcagccaagctggattgtgtgaaagcacagtggggtggtgtgcagggtggctcactagtggttgggagtggatgttgctggaggctcactagttgttggaaatcggtgttgctggaggctcagtgggggatgtcaatgcatgtagctagtcatggactggcagtgtggtttccatcatgtctcagggtagtgggatttcctgcctggtgactggctttctcctggataagtgttctgttttctcagcctggcttctgaagtccccaaataccacctttgtcaccttctgttggccaaataagtcagtagtctggtcaaggtttaaggggaattggtcctcacagagagaggagcaggaaagaagttgtcacctttagtctaccagaaatgacatttttataacaagtttgttccaaatacattccagttccccttttgaatactttttgactcacagggtatttcaaagtttattacttggttttcagacatttgaggcttttctggatatcaatttgttgttggtttctaatttaatttcgagtgttcagacaacatcttttgtatactatttcaggcttgaaccttttctcaatcgatcgacatacagtttatcttggtactgccaagtaccatttgggtcaggattttgtcatttagatccatatttttcctatatttttatctggttcttccatcagttactgagagagcactattaattcaccagctataattttggattgtcaatttcctgcttttgtctgttgtttttgattcacatactttgaggctctgtgtgtgtgtgtaatttgtgtgcactttgaggcacaatttataattgtaacatcatcctctctgattattttatttttattaaattaccctgtttatttctggtgatatattttgctctgaagcctctttcatctagtgttaacatctctgttgaagctttttatgattagtgtctggatagcatatttttaagattagtgtctgcatagcatattttttctcatactttgtttgtgtctttgtgtttaaattgtgtctctgtggatgccatattgttgggtcttgctttcctctcaggtctggcagtctctgtcttaagtagagtatttgtccagttacattgtaactaatcattgctaaggttggatttaggtctgccatttttctacttattttctatttgtttgtttatttttttaagacagggtcttactctgtcacccagactgtagtgcaatggtgcaatcttggctcactgcaacctctgcctcccaggcccaaccaatcctcacttgagccccctgagtagctgggactacaggtgcatggcaacacacctggctaatttttatattttttgtagagatagagttttgccatgttgcacaggctgatcttgaactcctgagctcaagcaacctacccaccttggcatcccaaattgttcatattacaggcatgagccaccatgcctggccttagtctgtgttttgatcttctatatattctttcctaacttcttttgggttaaatatttctaaatattccagtttgattaatcttttggctttttgaaataattttttataggctgggcatgttggcttatgctcataatctcagctctgtgggagtccaagggaggtggattgcttgagcccaggagtttgagaccagcctgggcaacatgggaaaaccctctctacaaaaaaaccaaaccaaactttagcctgacatcttggtgtgcatctgtagtcccaactattcgggaggctcaggtgggagggttgcttgagcctgggaggttgaggctgcaatgagctgtgatcatgccattgcactcctgccagggcaacagagtaagatcctgtgtcaaaaaagatcattttttataaataatttattattttgaattttggtaacaaacacataccttaaaatttaccatcataaccagttgtaagtgtacagttttgtagagttaagaatatttacagtgttgtgtagcagatttctagatgtttttttatcttggaaaactctatactcattcaacaactattaatttcccgttccttccacctcctggcaagtactattctactttgtgtttctaaaactttggcttatatacctaggtttatataatatttgttgttttgtaagtaggttccatgttatgtgtcagatgtgtcaggattttcttcctttctattgctgaataatatttcttcatatatatatatatatatatttctctctctctctctatatatatatatatatccttttgtttatccatctattcctggatggacgttttggtttcttccacttgtggctgtgtaatgatcctgtgaacataggtgtggaagtatctgttggaggtcctgctactagttattctgtctctgtagaagttggatggctggatcatatggtcattttattttgttttttttgaggagccagttcatatttccaccaacagtgttcaagggtttcagtttcacctgcacttgttactttctgttgggttagaagtgatgtcccattgtggtttctatttgcatttctttaatgactagtgatgttacacatcttctcatatatctcatgtatctgttggctatttttatatcatctttgcatctttggataaatgttctttgtccattttttaatcactttattttgttgttgtgttgtagtggggttttttggtcatgatcattcatttatctcacagttcattcttgttacttgggccagggtcatggtcattcattatctctcagttcatcctcattacgttgggtaaacagtcatgctgcagggtatagattatgttattctgttactttcaggtagaattggggtctaggttctaattgtttctaagttcagattctgaatgagaatcagcagaggtagaccactgctgctgaggcctggggattgctggggaaaaggcaggaaacagatacggacctgaccatggaaggtttgtgtttcacggctcccatctgggtacccaaggaacctacatgtagctcgtgtgtggaaagcctacattgcccactcaaagcaattgaggatggaacagtcttggggctggagctcattatttggaatgataaccacatctgcacagagaggacctgataagatgttgtccttccatgtatatctgggaatcctgtgtagggtctctctgtaaggacaagggcagtgttggctccttggcctctagttagcctcacaagtagtctagtaaaggctttgcaaacttgtcaccatctgtggacattctggccagctcttgttttcaccctactgacttcttcagacactaggcttttgctttagaccattcatggtttttcttcctcttcaaatcagtaatcaataaatcgtcttcaagtcaataaatttccactcctttaggaaaccctgatcttctggtcacaccaaggtttaattatctggtttgattgtttttctgttttgttttttttttccttcttcctaggggattctagtaattctagtttgatgtctcactttctccattttttatttcttagttttcttctgtgattattttcactgcagctgcagggcctaatcctaggttggcagagaactagcacttactctgccctaattggaatccaggagagataggaggtgccctagtgtgaaaatgtgtttgctcctctctgcttctggtagtctctctgtaggagttctttacgtattctgtatgttcacttcttatgagatacatgatgagcaactatagattgaatgtctccgatccaaaaatctgaaatcccaaatgctccaaagtctgaaactttttgagtgccaacatgacactcaaaggaaatgcttattggagcatctcagactcaggtgtttgaattcgagatgctcaaccagtaagaatagtgcaaatattacaaaatctgaaacacatcccaagcatttcaaataagggacactcaactggtattttcttttattctacagtttgccttttaccctgttggttgtgacctttgtggtacagaagtttttaggtttgatatatttttgcttttactgcctgagcttttaatgtcatatcctaaaaattattgacaaattcatcatcataaagcattttccaaatttgttttccctaggagtttgatagttctagttttacatttaggtttataattcactttgaattaattttaacgtggtgtaaggtaagagtccaacttcactgttttgcatgtagatatacaattttcccaacacaatttgttgcagaaactgtccttcaccattgagtggtcttggcatccttgtggaaggtcattggaccatatatgccagggttggtttctaaggtctctgttgtgttggtccataagtgtgtcaagagtgtctttatgccatgaccacattttttttttggcttattgcagttttgtaattgttttgagacctttaattttgttctgtttcaagatcgatttgcctattcatgggcactggagattccatatgagttttaagataggtttttctgtttatcaaaaatgtcattggaatctttataaggattgtaatgaatctaggtcacttcgagtagtgttgacatcattccaagatgaaatcatctaatctgcaaacccagcttttcttttcatgtatttgtgtttaatttctttcaacagtgttttgtagttttctgtgttcaaatcttttgccctcttggttaagcttatttataattttttaatgctgttgtaaatgtaattttttttttttttgagatggagtcttgctctgtctcccaggctggagtgcagtggcactatctcaggtcactgcaacctgcaccttccttattcaagcaattctccaacgtcagcctctcaagtacctgggatcacaggtgcacgccaccacgcccagctaactttttggtatttttagtagagacagggtttctccatgttgaccaggctagtcttgaacttgtgacctcaggtgatctgcccgcctcggcctcccaaactgctgggattgctagcatgaaccaccgcacccggccaaatgtcattctttttaaaaatttcttttgttttctctttcttttcttttctttctctctctttctttcctttctttcttttttttgagaccgcgtctcactctgtttcctaagctgcagcacagtggcacaatctcagctgactgcaacctccaacttccaagttcaagcaattctcctgcctcagcctctcaagtagctgggactacaggtgtctgccactatgcccagctaatttttgtatttttaatagagatagagttttactatttatattagagatggggttggcccagctggtcacgaactcctgacctcaggtggtccacccgccttggcctcccaaagtgctgggattacaactgtgagccactgcacctggcctctttttaaaattttatttgcagattgttcattgttagtttatagaaatgcaactgacttgagtgtgttactatatcctgaaactttgttgaatttcattattctaccagtattttgtggaatttcagaatttttacacattacatcatgttgtctgtgaacaaaattttgtactttttcctttccaatttgcatgctttttattactttctcttgcctaattattctaagtagaaattccagtgctgtggtgaatagaagtggcaggaagagaagttgctatcttattcctgaccctagaggaaaagattttagtttttcacgattgagtatgatgttagctgtgagcttttcatgtataatctttatttactgaggagtttccatatattactaattctttgagtgtttttattacaaaaggtgttcatctggctctggaaccagataaatgttgacctgatagaatggattggaatgtccccttctggtttttgaacatttttggaatattttgcagaggattggcattaattcttcttgaaatgtttggtaaaattttccagtgaagttatctggacctggaattttctttttggtggggtttttgattactggttgaatcttcatactagttacaggtctctttggattttttatttctccgtgatgcagtatggtggtttgtgtttctaggaatttataaatttattctaggttgcccagttttgtggcatatggttgctcacattagtgtcttgtaatctttttcatttctgtggcatctgttgtattgtcaactcttttatttatgattttagtatttgagatttctctttttttcttaatatagctgtgagttttaaaatttttattgatctttaaaaaaacaaactcagtgttttttttcctttttttctggtcttattctgcttatctctgctctaatctgttattttcttccttttgcttggtttgtcattagtttttttttttcctccttcaggtgtaatattaggttattgatttgagatctttcttctttttaatttaagcacctgcagctataagcttccctttagcaagggtttgagatctttcttctttttaatttaagcatctgcagctgtaagcttccctttagcacgggtttgagatctttcttctttttaatttaaggatctgcagctgtaagcttccctttagcatgggtttgagatctttcttctttttaatttaagcatctgcagctgtaagcttgcctttagcactgcctttgttgcctcctccagagtttgagtatgtcatggtttcgttttcatttgctaaaacattttttgtcctattgtaatataattgtgttgtttttaataaaggtaattaatgaaacacataatgaattgtgcttctgtttttataatattttaagcattcttaactcagaaatgtaaattttagaaaaaaattccaggccaggcacactggctcacacctgtaatcccagcacttgaggaggtcgaggcgggaggatcatctgaggtcaggagttggagaccaccctggccaacatggtgaaaccctgtctttactaaaaatagaaaaaaatatataaaagttagctgcgtgtcatggcgggtgcctgtaatcccagctactctggaggctgaggcaggggaatcacttgaatctgggaggcggaggttgcagtgagctgagattgcaccactgcactccagcctgggtgacagaatgagagtccgtctcaaaaaaaaagaaaaaagaaaaaatttcagacatatttatttgtatttcaatttagaaactatgatctcctaagtgtattgacacagcaacctgacataaagataaagaataataagcatataacaaaacagaaacttgcaaatacctgttttttattaatttttaattatatgtatttaaaaattgccgggtgcagtggcttacacctgtaatcccagcactttgggaggctgaggtaggcagatcacatgaggtcaggagtttgagaccagcttggccaacatggtgaaacttcatctctattaaaaatcaaaaaattagccaggcttgatagcatgcatctgtattcccagctactcgggagactgaggcaggagaattgcttgaacatgggaagcagaggttgcagtgagccaagatagtgccactgcactccagcctgggtgacagagtgaggctctgtctcaaaaaaataaaaattgtctgggcgcggtggctcacacctgtaatagcagcactttgggaagctgaggcaggcagatcacgtcaggagatcgaaaccatccgggctaacacagtgaaacgccatctctactaaaaatacaaaaaattagctgggcgtggtggcgggtgcctgtagttccagctactctggaagttgaggcaggagaatggtgtgaacctgggaggtggagcttgtagtgagctgagaatgcgccactggactccagcctgggtgacagagcaagactctgtctcaaaaaaataaaataaaataaagctaaggtgtggttgacacacaaaaattacacatatttaatatataccgtgtgtgtgtgtgtgtgtgtgtgtgtgtgtgtttgtgtgtgttacggaggttttactcttgttgtccaggctggagtgcagtgacacgatctcagctaactgcaacctccgcctcccgggttcaagcaattctcctgcctcagcctcctcagtagctgggatcacaggcgtgcgcccccacgcctggctaatttttgtatttttttagtagagacagggtttcaccatgttggccaggctggtctcgaactcctgacctcagatgatccacctgcctcggcctcccaaagtgctgggattacaggcgtgtgacaccgaatatatacatcttaatgagtatagagataagtattcgccccaggactcatcacaacaaataatgccgtaaacttgaccatcactccccatatatttctcattctcaccctttttaaaaaatgagaccgggagtggcggctcatgcctgtaatcccagcaatttgggaggccaaggcaggtggatcacgaggtcaggagatcaagatcatcctggctaacacagtgaaaccccatttctactaaaaatacagaaaattagccatgcgtgatggcgggcacctgtagtcccagctactcgggagactgaggcaggataatggtgtgaactcgggaggcagagcttgcagtgagccgagatcgtgccactgcactccagcctgggcaacagagtgtgactccgtctcaaaaaaaaaaaaatgagatgaccatttcacataaaatataccctcttaagtacttttttaagtgtacaatacaggacggccatgcatcagagatatatgtgggtttggttccagaccactgcaataaagttttatacaatttcttttggtttcctagtgcatgtaaaagtatgtttatactgtgctgtataaagtgtgcaatagcatatgtctacaaagtatgcacactttaatttacaaatactttattgttaacaagtgctaacagtcatctgagccttcagaaagctgcaatctttttttgtgtgtgtgacagggttttactctgtggctcaggctggagtaattgcagcctcaacctcatgctcaatcaaacccccacctcagactcctgactagctgggactacaggtgcatgccaccgtgtccagctaatttttgtatttttttttgtagagatgtggttttgccatgttgccttgatgtcctgggctcaagcaatccacccaccttggcctcccaaggtgttgggatgacaggtgtgagccactgcacctggccaagtttcagtcttcttgctgatggagggtcttaccttaatgtaaggtggtggttgctgagcgctggggtggctgtcgcaatttcttaaaaaaagacaacattgaagtttgctgtgtcaattgactctccctttcacaaaagaattatctgtagcatacgatgatagctttttacccacagtagaactttcaaaattggattcaatgctgtcaaaccttcgtactgcagtaccaactaagtttatgtattattgtaaatcattgggttcaatcctgtcaagccttccttctgctgtaccaagtttattctaaatctgttgtcatctcaacattgtttacactgtcttcaccactagtagatttcatctcaagaaaccactttctttgctcatccgtgggagcaactcatcctctcacgttttctccagaggatgctgcagtctcgccagatcttcaggctctgtctctgattctagtgctcttgttatttccaccatatctgcagttacttcctccacagaagtggtgaacccctgtgtcatcagtgagggttggaataatcttcccaacttttctctctctcttttatttttttgagatgaagtcttgcctgggctggagtgcagtgatgcgatctcagctcactgcaacctccacctcccgtgttcaagcaattctcctgcctcagcctcccaagtgtttgggattacagtcacccccgaccaggcccagctaatttttttgttgtttatagtatagacaggatttcactatgttggccaggctggtctcaaattcctgacctcatgatccacgtgccttggcctcccaaagtgctgggattacaggcgtgagccaccaagcccagccccaacttctcctaatgttgctattttgatcttcttttttaaatcatgaatgttctcaatggcgtctagaatggtgaatcctttccagtaggttttcaattattttgcccagatccatcaaaggaatcacttgctagagaagctatagctttatgaaatatattttttaagtgataagacttgaaagttgaaattattctttgatccaagggcaccagaatgaatgttgggttagtaggcatgaaaacaatattcagctctttatacatctctgtaaaagcccttgagtaccagcggcattgtcagtgagtggtaatactttgaaaggaatcttatttcttgagcggtagttgtcgacagtgggcttaagatattcagtaaaccgtatttgtaaaccgatagtctgtcatccaggctttgttcccatttgtagagtacaggcagagctgtgttttatcataattcttcagggcccttggattttcagaatagtaaatcatcattggtttcatgttaacatcaccaactgcattaggccttaacaaaagagtcagcatgtcctttgaagccttaaatccaggcatcaactcctctctagctgggaacatcctggatggcatctccttctagtagaatgctgttttgtcttcattgcaaatctgtttagtgtagccatcttaatcaattatcttccagatagctttctgcagcttttccatcagtacttgctgctttatcttgcgcttttatgttatgaagaagacttttttccttaaacttcaagaaacaagctcttctagcttcagactcttcttctgcagctgcctcacctctctaagtcttcatagaattgaagggaggccgggtgtggtggctgtcacacctgtaatcctagcactttgggaggccgagacaggcagatcacctgcggtcgggagttcgacaccagtctaaccaacgtggagaaaccgcgtctctactaaaaatacaaaaaattagccaggtgtggtggtgcatgcctgtaatcccagctactcagaatgctgaggcaggagagcttgaacttgggaggcagaggttgcgatgagccaagatcacgctattgtactccagcttgggcaagaaaaatgaaactctgtctcaaaaacaaagaaaaaagtaaaaagagagttaggcttaggcttaatggatttttttttatcttctatctagatcaattaaactttcttcataacagcagcaagattgtttagctttttatcattcatgtattcactggagtaatactttaaatttctttccagaacacttcctttgcattcacaacttggctaagtgtttgttgcatgaggtctagctactggcctgtcttgcttacagcatgccttaatcactaagcttaattatttctttcttttggtttaaagtgacagacatacaactcttctttcacttgaacatacagaggctattgtagggttattaattggccacattttaatattaataaaaagaagcctgagaaaaagagagagaaagagaaatggcccgttggtggggcagtcagaacaaacgcatttgtcaattgtttgctgtcttatcctggtgtgatttgtggttcccaaaacaatgacaacagtagcattaaagatcactcattacagatcaccataacgattcaataataaaaatcttaaaatactgtgagaatgaccgaaatgtgacacagagacgtgaagtgagcacgtgctgtaggaacaatggtgccagtcagacctgcttattgcagggtggccacaaaccttcaatatgtaaaacacatggtcacaaaacacaataaagcaaagtgcagtgaatcaagtcttttgatagactctgacaatctctatctttgaattggtacattcataccattagcattcaaagtgattattgatatcattagattaatatctactatatttgttactgttttctattcattctcctcagtctccattcttttgtctaccagtctttttctgccttttgcagttttcattgatgattttagatgactacattttccctgtctttcttagcatgtacttctctttttaaaactttttttaactagttgccacagaatttgcgatatacatttacaacaaattcaagtccactttcaaataacactatcccactatcccacgaataagactacctgcttaacaaacaaaacacctaattcctcagtaacatttataacaaattcaagtccactttcaaataacactatcccactatcccacaaataagactacctgcttaacaaagaacacacctaattcctcaatatacatttacaaccaattaaagtccactttcagataacactatcccacttcacgggtgactacctgcttaacaaagaaaacacctgattcctccctcccatccttccattccattccttgtattattgttccttatttcacttgtgtataagcatacataatctatctgtgtgtatttattattatctacaaacttattggtcagatcaattatgaataaatacatgtttttattgtaccacaattcctccctcccatccttccattctattccttgtattagtgttactcatttcacttgtgtttaagcatacataatctatctgtgtgtatttgttattgtctatgaacttcttggtcagatcaattaagaataaatacataggtttttattgtaccacaattctttaatgctctttttaaaaaaatgttgatccaggtttcagttatatatcttttgtttccctctaaagaatttcatttaacatttcttgcaagacaggtctcctggcaacaagtttcttgaatttttatttttctgaggaaggccttaattctccttcacttttgaagggtgttttcagtgggtacagaaacttaggttggtgggttttttctgtcaacattttgattttttcatttcactgtcttcttgctttcacagtttctgcaatgttgaatgcagttcttatctttgtgtctctgtaggtaaggtgttttctgccccacctctggtttctttcagagttttcctttattttttatttcatatagtttgaaaattatatgtccaagtgtaggttgttggcatttattctgcctggtgttctcagagcttcctggatctttggtttggtgtctgacattaatactggaagttctcagacatggttgttgcagaactttcttctatttcttctcctcctcctggtattctcattactctgtttcaccttttgtagttgtcccacagtcttggatatcaccttctgttcttttcagtgtttcttttctttagttttcgaagtttctgatgataaatcctcaagctcagagattctttactcagctgagtccagtctactaataagccatcagaggtattcttcagttatttaccacattttttaccactacattatgttgaaggttcttacgatgtctgtctttctgattacattacccatctatacttgaatgctgtctagttcattcattaggcccttagcatattctccagaggtttaaaaaaaattccaaaatcatatctttgtctggttctgaagcttgctctgttgacacaaattatatttttttctttttttggattttagtatgccttgcaattttttccctttattctcatgcatgaagcacccactaaaagtgactgctgttagtatagctttagtaatgcggtgatgaggtgacagggcaggtgatgctctcttagtctctttaggctactataacaaaatactttagactgagtaattcataaacaacagagatattgctcacagatctggaggctggaaagtccaagactaaaggggcaggatatttagtgtttggtgaaggtcaaacattcagacactcgcaacgactatagtgacagcagcagtcttcaggaatcctatgtgagggacaaacactcagaagccagctggagtgttccagaatcctatgtgaggaacaatcagaccacagcaggaatgttctggaatcctatgtgaggggcaaacattcagaccacagcaggagtgctctgtaatcctatgtgagggacaaacatttcaaaacctcgtagcagtgtgctggaatgttatgtcagggacagacatttagaccctcgcagcagtgttctagaatctcatctgcaggacaaacattcagacactcgcagcagtgttctggaattctatgtgagggacattcaaaccccaacagcagtgttctagaatcctatgtgagggacagacgttcagaccccagcagcagtgttctggaatcctatgtgaggtacaaacattcagataccagcagaagtgttctggaatcctatgtgagggacaaacattcagaccctcgtagcactgttctggaatcctatgtgaatggcaaaaattcagaccacggcaacaatgctcaggaatcctatgtgagggacaaacattcagaccctcctagcagtgttctggaatcttatgtgagggacaaatattcaaaccacagcagcagtgttctggaatcctatgtgaaggacaaactttcagaccacagcaggagagttctggaatcctatgtgagggacaaactttcagacaaaagcaggagtgttcttaaatcctatatgaaggacaaatattcagaccccaggaacactgttctgaaatcctatgataagggcaaacattcagaccccaacatgaatgttctggaatcctatgtgagggacaagcattaagaccatagcaggagtattctggaatcctatgtgagggacaaacattcagacccttgtagcagtgttctggaatcctatgtgattaacaaacattgagaccacagcaggagtgctctggaatcctatgtgagggacaaacattcagacgccagaaggagtgttctggaatcctatgtgaaggacagacatttagaccctcgaagcagtgttctgcagtcttaagtgaggaacaaaaattcagaccctagtaacagtgttctggaatccttttttgagggacagacattgagacctcagcagcagtggtctggtatcctatgtgagggacaaacattcactccccagcaacagtgttctgtaatcgtatgtgagggacaagcattcagaccccagcagcagtgttctggaatcttatgtgagggacaaacattgagaccctcgtagcagtgttctggaatcctacgtgagacacaaacattcgtaccacagcagaagtgttctggaatcttatgtgagggacaaccattcagaccacagcaggagtgttctggaatcctatgtgagggacaaccattcagaccacagcaggagtgttctggaatcctatgtgagggacaaatattcagaccctcatggcagtgttctggaatcctttgtgagggacaaacattcacaccccagcaacactgttctgtaatcgtatgtgagggacaagcattcagaccccagcagcagtgttctggaatcttacgtgaggggcaaacattgagaccctcgtagcagtgttctggaatcctacgtgagacacaaacattcgtaccacagcagaagtgttccggaatcttatgtgagggacaaccattcagatcacagcaggagtgttctggaatcctttgtgagggacaaccattcagaccacagcaggtgtgttctggaatcctatgtgagggacaaatattcagaccctcatagcagtgttctggaatcctttgtgagggacaaacattcagaccccagctggagggttctggaatcctgtgtgagggaccaacattcagaccctcgtagcagtgttctggaatgctatgtgaaagacaaccattcagaccctcatagcaatgttctggaatcctatgtcagggacattcagagcccagccgcagtgttctggaatcctatgtgacagacaaacattcagaccacagcaggagcgttctggaatcctatgtgacggacaaacgttcagaccatagcagtagtgttctgcaatccaatgtgagggacaaacattcagagcccagcagcagtgttcaggaatcctatgtgagggaccaacaatcagaccctcgtagcagcgttctgaaatcctatgtgagggacaaacattcagaacccagccgcagtgttctggaatcctatgtgacagaaaaacattccgaccacagcagcagtgttctggaatcctatgtgcggtacaaactttcagaccacagcaggagagttctggaatcctatgtgagggacaaactttcagaccccaggagcagtgttctgaaatcctatgttaagggcaagcatttacatcccagcgtgaatgttctcgaatcctaggtaagggacaaacattcagaccacagcaggagtgttctcgaatcctatgtgaggaacaaacattcagaccacagaaggagtgttctggaatactatgtgagggacattcataccctcttaggagtgttctggagtcctatgtgatgaacaaactttcagaccacagcaggagtgttctggaatcctatgtgagggtcaaacattcagaccccagcagtagtgttctggaatcctatgtgagggcaaacattcagacccacgtggcagtgttctggaatcctatgtgagggacaaacattcagaacctcgtagcagtgtcctgaaatcttatgtgagggagagacatttagaccctcgcaacagtgttctggtatcccatgtgagggacaaacattcagaccctcccagccgtgttctggaattctatgtgagggaaagacattcaaaccccagcagcagtgctctggaatctgatttgaggggcagacattcagaccccagcagcagtgttctggaatgctatgtgaaggacaaacattcagaccacgggagcagtgttctagaatcctacgtgaaggacaaacattaagactctcatagcagtgtcctggaatcatatgtgaggaacaaccattcagacaccagcagaagtgttctggaatcctaggtgtgggaaaaacattcagaacctagtagcagtgttctggaatcctatgtgagggacatacattcagaccacggcagcagtgttctggaatggtatgtgaaggacaaacattcagacccttgtagcagtgttccggaattctatgtgagggacaaacattcagaccacagcagcagtgttctggaatcctatatgacggaccaacattcagacccttgcaacagtgttctggaatactaggtgagggagaaatagtcacacccttgtagcagtgttctggaattctatgtgactgacaaacattcagactccagcagcagtgttctgtaatcctatgtgagcgacaaacattcagaccccaagggcagtgttctgaaatcctatgttaagggaaatattgagaccccagcatgaatgttctggaatcctatgtgagggacaaacattcagaccacggcaggagtattctggaatcctatgtgaggaacaaacattcagaccacagcagaagtgttctggaatcctatatgagggataagcattcagaccctcgtagcagtgttctggaatcctatgtgagggagaagcattcagagcacagcaggagtgctctggaatcctatgttagggacaaacattcagaacctcgtaacattgttcgggaatcctgtgtgagggacagacatttagacactcgcagcagtgttctggaatcccatgtgagggtcaaacattcagatcctcacagcagtgttctggaattctatgtgagtgacaaccattcagactccagcagcagtgttctgtattcctatgtgaaggacaaacattcagaatccaggagcagtgttttgaaatcatatgttaagggcaaacatacagaccctagcatcaatgttctagaatcatatgtgagggacagacattcagaccctcgcagcagtgttctggaatcctagatgggggacaaacattcagaccccagcagcaggcttctggaatcctatgtgggggacaaacattcagacaatggcagcagtgttctggaatcctatgtgagggacaaacactcagagccttgtagcagtgttctggaatcctatgtgagtgagagtgcctggagcctacccaacctgacgcccccaaagccttcacagggtctgacctcccagcatgcacctgcctctccctgaaccccaactgcccaccctgccttttccctggcctcctccatcctgtgcagcccatagactgtgaccatctctccagccactctggcccttcctttacctttgtcctgtcagaatctctgagcaggatctcccaggtccatccaaatacgtgctttgtccacttttgactaggcccttgggcatcactgggctatcccagctgtccacagggccttcaataatgcacattgcacctggcttatccaagcagtgctcagcagcccacattgaccaggtccctgctgaccagaccccgcacatcaggtcctccctgatgacaccctcactgattagaccctcatgaccaggccccactaacaaggcccccactgccaggcacacaatgacaaggactccaccgaccaggaccttactgacaaggcctcacggaccaagtccttactgacaagtcctcactgagtaggtcattattgacaaggcctcactgatcaagttccactgatcatgacctcattccctggccccaaagatgaggccccactgaccagacctccagggaacaggttgccactgatcaggcccctaataaccaggcctaagatcaccagatgcccctgactgggaccctagtgagtagaccccactgaactggcaccaaatgctgagatccccgctgaccaggtcaccctgtagaccagtgctgcaaaagtcaccactgaccaagtcgtctctgaccaggacgctacagattaggtcccgctgacaaggctgccctgaccagggccccactgacaagggcctcactgatgaggacatgcccaccagggtctgctgactaggtcccatgtgcccagtcctccactgaatagcaccccttgacctggtcaccagtgccccagcccatgctgaccaggccagcactaagccccagctgaccaggtctccactgatcaagccccacagcccaggtttgcactgaccagacaccaaacaactggcagccaataggtccccactcaccaaaaccccactactagaccccactaatgagaccctctctaagcagacccctgctgaccacgatcccactaaatagtcctcactgacctaggtccactgaccaggcccacactgatcaggtccctcctaaccacaccggaaatccaagcggcaatgacatgtttcatatggcagaagttggaacaagacagagagaggaaagaggttccacagccttttaaactactagatctcatgagaactcactcactatcaggaggatggcattaagggcttggtgctttgccatttgtgaaggatccactcccactcctttatgattaaagctttttccacctaggccccgactctaacattagggagtgtactttcacatgagttttggaaggggcatagagaaaaaccgtattattctgtccctgaccccacaaatctcatgtccttctcacattgcaaaatacagtcatgccttgccagcagtctcccaaagtcttaactcatttcagcattaactcaaagttacaaagtccaaagtctcatctgggtcaaggctacattctcttttgcctacgagtctctgaaataaaaagcaagttcactgtgtctaaggtacaatgatggtacaggcattgtgtaagctttctatatccaaaagagagacattttccagaaagcttcttatttttatctgagaccccctcagcctggccttcactgtccatgtttttgtcagcattcttgtcacagccatttaaccagtctctaagatggtccaaaaatgttctcatctgtctgtcttctttggagccctccaaactcttccaacctctacccattacccagttccgaagttgcttccacattttcaggtatctttataggaatgctccagtcctcatttgccatttttggtaagatttattttgaaaaagaggtttaattggctcatggttctgcagagtggacaggaagcttagtgcttctgcttctggggggcctcagaaatctttcaatcattgtgcaaggtaatgaaagagtgaattgtctcacatggcaagaggaaatcacggagagtagggagtgatatagagttttcagtggccagatctcacgagaagtcactcatgattgtgaggacagtaccaaggggatggtgctgaaccactcatgagaaatttgccttcatgattcaatcaccttataccaggatccacctccaacattaggaagcataactcaacatgagatttggtggggacacatattcgaattgcctcatcagtctttgagtataaagacatccatagcaggctttatccagccagcttctttggggttctttacagggtttctggtctatagcatatccactaaaatattcctacttcaaaaggcaataaagtaagtggtattatcattcttcaaaaagttataatggtagtgtaggcattcatagtatgatttagttcatttgctactgtttctattctatcaccatattaacactttcctacacaagtctatattcacctgggtttcagttgagcacaaagtcatccttgtactaccaccgatagctggcaccagccctttgatactgttatcattctgctgtagaaagtacccgtgcactggaaaaagtccacactcgaatagctagtcattcaacactatcaaattttaggtgactttttgaaaaaatagtatctcttgttgcaagaaatgttccatctgtgatttcaagtctctcgcttgagtggattggatagaagtggtgaatttcagccaaagtggccaaagaaatcctgttcctgtgataatgatgccatcagcctctgtacctctgtcttcccttctgccacatgttgcctgttctccgtgactgtcgtaagagcttccttgtatatgaggatgatgtccaggatgttggtctggtgtccctgagacagcactaacaggtccatggctgggtccaggtccttcctggacggattggcaaggagctcactgatgttcttgaaggcatctctggtgaagtggatggcctagtcaagttccaaggcctggctgaggccgaagaaaaactggccgccttctgaagctctttctaaaagcctgtcactgtcatctgcttgcatgtcaactcattggctgtgaggttgagctgagtggcctgtgtccatcttcttggggaagtatttgaagccatcaatcttgctctcccacccctaaaggttgatggtcaccacctgggggtgtgctgagggtcagaaagaagccagcactcaccatctcatccttctcagccttcctcttgcactctctccaggctgtctcttcagtgctggtgggatatatcagaaagtgatggaagatgtggcactgtgcccacacccagaagctggccatgtggttggctcatccaccagaatggatgctctggttgctctttgaaccagcttggccttgcctggcatgtacaggccccaggtacagacacgttgctctgagtgaacttgtcctgccttgggccaaattctgtcaggccagggtcacaaaaggccgagttccacgggtggtaatcctggctgctttctgcacttcaacataaagacctactgaagatggcctgtggtctgcctctttgcaaccaagaagcccgcagtgccatatgagccctgaggcatggactggagcccccaaggcagcgcacacgctgctcctgagcctgctgctcattttctctgtgtggctccatttgtgtcacagttgttgcactgactactgcatactgaggaaggccaggctggctcaaaaagcaaccggccacctctgcaagggtgtgcctggagctggtggaccagccaccaacctgacttgctgccggtcgggttacatcagttcttctaccctacaggtagggccacagtgctatctgcttttccttaggcctctgctccatcagccatcaggaggcagcccctcaggctgtaggaatctggccatccctgcttccttgagtgggtgaggttggtggttgctccacctgctccaggcacacccttgcagaggtggctgcttgctctttgatccagcttggccttgcctggcatgcacaggccccagctacctatatgccgttccaagtcagcttgtagtgtgttgggccaaattctacctctggccagggccacagaaggccgagtcccctgggtgctaatcctggctgctttctgcacttgaacataaagtcctcctcaagaccgtctgtggtctgcctcttggcgaccaagaagcctacagtgccatacgagccctgaggcatggactggagccacaaaggcagtgcacgccccattcctgagcctgctgatcatttcctctttatggctccatttgttgtacacttgttgcagtgaggcttgtgcatgccaggcaaggccaagctggctcaaagagcaagcagccacctctgcaaggtgtgccaggagcaggtggaccagccgccaacctcactcactgtcagacgtggtacatcagttcttctaccctaaaggtggggccgagaagtagaccacaggccatcttgaggaggactttatgttcaagtgcagaaagcaggcaggattaccacccaggggactcagccttctgtggcccacagtgccatatgaaccccgaggcatggaccggtgccaactgctttatacaaaaattaacttaagatagattaaagagttaaacatgccacctgcttttcctcaggcctctgctccatcagccatcaggaggcagccactcaggctgtggaaacctggccatcctggcttccttcagtgtgtgaggttggtggctggtccacctgctccaggcacacccttgcagaggtggctggttgctctttgagccagcttggccttgactggcatgcacaggccccaggtactgacacgttgctctgagtgagcttgtcctgccttgggccaaactctgtcaggccagggtcacaaaaggccgagtcccacgggtggtaatcctggctgctttctgcacttcaaaataaaggcctcctgaagatggcctgtggtctgcctctttgcacccaagaagcccgcagtgtcatatgagccctgaggcatggactggagcccccaaggcagcgcacaccctgctcctgagcctgctgctcattttctctgtatggctccatttgtgtcacagttgttgcactgacttgtgcatgctgggcaaagccaagctggctcaaaaaggaaccagccacgtttgcaagggtgtggctggagtgattggactagccatcaacgtcacccactcaaggaagcaaggaatgcgtgtttgtaccatgcatttcattacaggtacatttcccctgaggttgttggcctaggtttcttctagattttttattgttttaggtcttgcatttaactctttcatccatattacttaatttttgtttaaggtgtatgggtgtggcccagtttcagttttctgcataaggctagccagttttcccaagatcatttattaaatagggtatcctttacccattgcttgtttttgtcaggtttgtcaaagatcagatgcttttagatgtgtggtgtcatttctgaggcctctgttctgttccattggtctatagatctgatttggtaccagccccatgctgttttggttactgtagtcttgtagaataatttgaagtcaggtactgtgatgcctctagctttgttgttttgcttaggattgtcttggctatgtgggctcttttatggttccatatgaaatttaaagtagtttttctaattctatgaagaaagtcaatggtagcttaatgaggatagcaataaatctataaattactgtgggtggtatagcactcaggcacataaatgtccttgtgttaggcaataccattcaggacagagccataggcagagacttcatcaccagaacacaaaaagcaatggcaacaaaagccaaaattgacaaatgggatctaactaaactaaacagtatctgcagtgcaaaagaaactattatcagagtgaacaggcaacccagagaatgggagaaaattgttgcaatctatccatctgacaaagggctaatatgcagaatctacaaagaacaaacttacaagaaaaaaaaaacaaacaaccccatcaaaaagtggacaaaggatatgaacagacacttaccaaagaagacatttatacagccaacgaacatgtgaagcaaagcacatcatcactggtcattagagaaatggaaatcaaaaccacaatgagatacaatctcacagcacttagaatggctatcgttaaaaaatcagggaacaacagatgctggacaggatgtggagaaataggaacgcttttacacagttggtgggaatataaattagttcaaccattgtggaagacagtgtgacaattcctcaaggatctacaactagaaatatcatttgacccagcaatcccattactgggtaaatacccccaaaattataaatcattctaatataaagacacatgcacctgtctgtttatggcggcacttttcacaaaaccaaagacttggaaccaacccaaatgcccaccaatgatagactggataaagaaaatgtggcatatatacaccatggaatactatgtagccataaaaaggatgaatccacgtccttcgctgggacatgaatgaagctggaaagcatcattctcagcaaactaacacaagaacagaaaaccaaacaccacatgttctcactcataacttggagttgaacaatgggaacacatggacacagcaaggggaacatcacacaccagggcctgtcagcgtggggggctaggagagggatggcattaggagaaataactaatgtagatcatgggttgatggatgcagcaagccgccatggcatgtgtatacctatgtaacaaacctgcatgttctgcacatgtaccccagaacttaaagtataatttaaaaaaaaagaaatttgctttaaattaagcttttaatcatggaacctgtaaagaaaccccttttgaatcttttactaccacatcatagctgggacaaactgctgacgttttaaaagtaacacaaatatcaaacagaaagaactagacttaggaaccaaactcaggtttctgtagtgaacagggcagaatcttcacattgggtcaccaccactactccttcagtttggccttggctagcaaaaggatgacatttttatgtagatgagaccagttacgtaaaaaaaaaggtttaaaaaataatttctgctaactggaatgctttttgttgttgtttatttgtttgtttttttgcagccataggagttttagccaattcagaggccttgctccccacaatttggaacattcctttggatttgaccaagtcaggaagagatgggagaaaagtgaaacaacaacaataaaaccccaagcataaacaaacaaaaagagttaagcaaaacaacaactgcacaattcatatgattactgagtgttctaatggtaaggagagtggtgaagccatgcgtggtgatgtagaatacttccacatctctggtgaggagctgccccttgggtctgagtttctgggaggggagagggagaagctgggtgaggcaggcatgaatcttgaggagtcagggctgggggaccgctcatattctcccgagacctgtgagtctctgggggactcctgggtgcatggggctgactcccacaggaacctggggatggctggagagtaactgggagccacaggagagtccctgaggcctgggggtgaagagatgaaagacacaggggtggagcaccgtgaggctcatgagtttgtaggtgattcctgggtgtggggggctgactccagctgaaatctggggttgtttggagagtagctgggagacaaaggagaccccccaagagctgggggtgagctgctggctgatggcagtaagagcatgtggtatattattgatgaacgtggggactctgaggaatcctcagaggaggacacgggagagcccaatgtcttcattgattgcccatcacggtgaggacagggaaatgggagcttgtgggattctggtgatgacagaggtgagtgtggtgaagccctaggggatggtgaatggtagctccggatccctggtgaggagcttccccttaagcaagagattctgagaggggagaggaagaagctgggtgaggctcgcatggaccttggggagtccgggctgggggaccgttcataagaagagccagacaagaccctactgttcttaggtgcagacatgattaggaaacctgcagctcccaggggcccgtaccaattttctaactcgaagaaggaaggagtgtgtgtgtgcgcgcgtgtgtgtgtgtgtgtgtgtttgtgtgtgcggtgtgtgtttgtgtgtgtgcggtgtgaggtatgtgccccttaagaaaatggaaatcaaccaaccaatgagacagacagacagacagagattcacttgcccacgtgttctgtcctgtcctctgaatccgcttccaagtcgcaagacgctgtgagctccaagtccacgcagagtccgccaaacgctccggccgctgatccgctccgcgaagatctgagtacaggccagccagggtgggtttaaatagcctcgggcgcagcctagcagcggaaagggcggagcttcactcctcctttccatcagtcacccccaactttcccaggctacacctggtaggaaactgttctcctgctttgatttcatgcgccacctttgggacaatctaagaacttacaagttttcttggccagatatattaggaattgtatgcactgaaacactgaaaaccaactagtggttctgtggttcccacgttgtggttttgacaccagcagcatccttgccacaatcaaaccccggagatgcacagatctgtgttgtaacaagacctccccctgactctgatgcatggcagtttaagaagtctttccgtgtaaacgaaaagactttgaagaaaaggtggagatatgcgttgtataaacattcttttgctctggaaccacgtagagacttgggagccagttgggtggagcattcgttggatgagggtgctcgggttaggaatatcaaggtgtggctccagataatccaatcatgtaattaagattccagttatgctcatctgttttaaaattccgtttgggtaaattctttgagtcagactgagaatggcaaagcctcaaccccaatttccagggagggttgagagcctcgggtggagctgatcaccaatagcctatggtttaacccatcatgactatagaaggagatctccataaaaacccaaaaggactgggttcagagggcttctggataacacttcctggaaggtagtgcgcccctccccacatgccgggccccacatttatttctgaactttttgcaatgtccgctaaaatacaacggcaaatgtaagtgtttacctgcgtgctgtgagctcttccagcaaatgaatgcaactaaatctgggagtggtggcaacctgatttatagccagttgctgagaagcacaggtaaaacaacgtggggcttcccattgttattagtgtgggaggcctgtctggcgggactcggccctttggaatctaatggtatgtccctgtagatagcgtcaccattgaattagaagacacacatatgttgagaataatctctctggtcatttgctgcatgtcttatttacaatacataatcaaattttttattctgaccttatggcacctgggttgagaacccatgatttgaaccaaacattggtctgtcactttctgagtttgaaactttattttgcctttagcgttttgttactgctttttcgttttcttttatttcgtttcgtttctaagttcggggtatatgtgcaggatgtgcagatttgttactaaggtaaacgtgcgccatggtggtttgctgcacctgtcaacccatcacctaggtattaagcccagcatgcagtagctgtttttcttaacgctctgcctcccgaaaggccccagtgtgtgttgttccccttcctgtgtccatgtgatctcatttttcagctcccattataagtgagaatgtggtgtttggttttctttccctggattagtttgctgaggataatgacctcacatcaccagtgtttttgtttttcagtataaagagtagtattttattgaataagatttgctcacaggaaaataagcttaaatctacaatgaatgccagactctacagcagaaagcaatttcctcacttttccacacacaatggttcctactaagcgaaaataagccataaaatttcattcacaaatgtactactctgtctcaaaacatctcacataatcatgcactgtactaaagcctttagatcagttcttccgtcaggttaaagaagtattgattgatgggcaatcaatgaagatattgggctctcccgtgtcctcctctgaggattcctcagatcccccacgttcatcaataatataccacatgctcttactgccatcacccagcagctcacccccagctctcggggggtctcctgtgtctcccagctactctccaaacaaccccagatttcagctggagtcagtcccccacacccaggaatcacttacaaactcacgagcctcacggtgctccacccctgtgtctttcatctcttcacccccaggcctcagggactctcttgtggctcccagttactctccagccatccccaggttcctgcgggagtcagtcccatgcacccaggagtcccccagagactcacaggtctcgggagaatatgagcggtcccccagccctgactcctcaagattcatgcctgcctcacccagcttctccctctcccctcccagaaactcagacccaaggggcagctcctcaccagagatgtggaagtactctacatcaccccgcagggcttcaccactctcacatccatcatcaacagaattccacagctttacgtttccctttcctaaccaagcaggacagtcactcatgtcattgtgttctcccgtgtcctcctctggagattcttcacagtcacctcattcatcaataatataccatatgttcttactgccatcatccagcagctcacccccagccacccatgagtctcctgtctgtcccagctattctccaactacgcccagatttcagcaggagtctctaccccacaccccagaaacacctacaaactcacagacctcagtgagatcctcgccagtctctctcacgtcttcacccccagcccttacggaccctccagtctgtcccagctactctccaaccacgcccacatttcagcgcgggtcagttccaggaacccagggatcaccaccaagcccaccactttcactgaattactccccagtctctagtacgtctttatctccaaccctcagggagtcgcctgtctgtcccagctactctccaaacacgcccacacttcagcgggagtccgttgcaggcacccagaaatcaccaccaaactcaccaatttcactgcgttactccccagtctctctcatgtcttcaccatccctcagggaccctcccgtctgtcccagctactctccaaccacgcccacatttcagctggagtcagttccaggcaccccggaatcaccaccaaactcaccaatttcactcagttactcctcagtctctagcacgtctttatctccaaccctcagggactctcctgtgtgtcccagctactctccaaccacgcccacacttcagcgggagtccgttccaggcacccaggaatcaccaccaaactcaccaatttcactcaattactctccagtctctctcatgtcttcaccagccctcagggactctcctgggggtcccagctactctccaaccacgcccacatttcagctgcagtcagttccaggcaccccggagtcaccaccaaactcaccagtttcactgagttactccgcggtctctctcatgtcttcacccccagccctcagggactctcctgtgtgtcccagctactctcctaccatgcccagatttcagcgggagtcagttccaggcacccaggtatcacctacaaactcagcagtttcactgagttactccccagtctctctcatgtcttcacccccagccccctgggactctcctgtctgtcccagctcctctcccaccacgcccagatttcagcgggagtcagcctcccacactccggaatcacctacagactcacagacttcactgaggtcctccctggtctctctcaggtctttgccctcagcccacagggactcttgtgtctctttcagctactgtcaaaacttctctagattccagctggagtcagttccaggcacccacgatacaccaccgaactcacgaatttcactgacttactccccagtctccctcatgttctcacccccagccctcagggactcttctgtctctctcagctactctccaaccatctccagatttcacctggagtcagcttcccgcacccaggaatcacctacaaactcacggaccttactgcaaccctcccccatttctttcacctcttcaccccctgccttcagggactctcctgggtctcccagcttctctccagccttccccggatttctgccacagtcagccccaggcacccaggacaaccctagacactcacaggcctcacgagactatctccctatgacctgtacctatacagggatggctcccacgcatccctcagtgaccccaaacccatctccacttacactcagacactcccagggcctgacagctactccccgttattgtccttcagttcgaagccctggccaatctactagcccacatgacgcagttacatggccatttctccacatttccggtgagggccccacaaccagccgcacaagagcccctcctgcattccgtcctcacacgcaggcctgtccatctacttgctactgtcacacttttgccagcagaagaggcccctgtaatggccgatatcaccacccagtctatcctcaccccacagctgtgcagcaggaccctcctgctggcccacgtggctgccagagcccatgctggcacgacgctccagcaggtcggcgtccctgcgggacacactaccggtgacatggctagcatgaccctccttcctggcagtgacactgttgatgtgaaccccggtttcacatctgtcatttgtaaataggaccattttcccttttcgctctcccttccattcacagggcttttcattctctctgtttctgcctccgtttcagatatttactcacctttttctctctcactatgtctgccgtggtctccattagagtgcgccacataagattcccccattaaaagtcatgaattgagtggcttttagtatacctgtggttgtgcacattcaattttaattcgcaatccattgtagaacgtcttatcacccccgaccagagaaaaaccctgtagacattagtcactcctcattctgtctcaaaccatcagggcctgatgggaaggcactttcgtctgtgggggacccatgccctgcttctccgtggcgcggttttttttttttcctgccatagatccctcacctctccttcctcaaatctcaccttcccctcttgggtcttctgtctgccttggggtacacctagcggcccgaggtgcactgtgggctcgaaccagggactccagtgtccctgaggcccagcgcaaggcctgatggaaagacactttcgtccgtgtggaagacccagtccccgcttctccgtggcaggttttttttttctctgccccatgtgcctcaccttcccctcttgtgccttctgcacgctttggggtacacctagcgacccggggcacaccctggtctcgaaccatggaagccagattccactgggccaagctcagtggctgatgggaagacacgttcttcctcggggacccaggctctgcttctctgtggcgttttttttttttttttccccagttgcctcactttcccgtcatgggctttctgcccgccttgaggtacccctagccgacccgaggcacaccgttgttttgaggcagggatgctagggtctccggggcccagtgcagggcttatgggtagggacgttcgtccatgtgggacccagtccccacttctgggcggcacagttttttattttattctctgccccaggtgtctcacctttctctcatgggccttctgtctgtcttggggtacccctagcaggccgaggcgcacgctgggctcgagccagggataccagggtccccggggcacagtgcaagcgctgatgggaagacagtttcttctgtgggggacccaggccccgcttatccgaggcacagttgttgttgtttttttctctgccccacgtgcgtcaccttcccctcatgggccttctgcttgcttttgggtacccctagcggcctgaagcacaccctggtctcgaaccaggaatgccagggtcccctgggcccagcgcaagtgctgatgggaagacactttcgtccgttggggacccaggctccgcttcttcgtggtgcagttttttttttctgccacaggtgcctcacctctccttcctcaaacctcaactgcccctcctgggatttctgcccgccttgtgttacccctagcaggcccgaggcgcacccggggctcgaaccggggtctccagcgtccacagggcccagcgcagggactgatgggaaggcattttcactcttgggggacccaggcccagcttctcctaggcgcggcttgttttcttttttttttctgccacaggttcctcacctctcctccctcaaacgtcaacttcccatcatgggctttctgttcgacttggggtacccctagcggcccaaggcgctccctggactcgaaccatggatgccagggtcaccggggcctagcgcaggcgctgatgggaaggtaccttcatccgtgggtacccaggccccacttctcaaagctgcggttttttttctccgccccaggtgcctcaccttcccctcattggccttctgcctgctttggggtaccacgagcaggcccgaggcgctgccggatctccaatcagggtcgccaggttctcggggctagcgcaggggctgatgggaaggcactttcatcagtggggacccaggcccggcttctccgaggtgctgatatatacatatatatatatatatgtatatatatatatatacatatatatatatgtatatatatatatatatatatatatatatatattttttttttttttttctaccacaagtgactcacctctcctcccttaaatctcgccttcccctcgtgggctttctggcttccttagggtaccctagcatgccagagtctcttctggtccttgaactagggtcgccagagtccagggggccagcgcaggggctgatgagaaggcactttcgtccgtgggagaaccaggccccgcttctcttccgcacgtttttttttttttctgccgcaggtgcctcacctctcttccctcaaacctcacctttacctcatgggccttctgcccgctttggggtacacctagcgggcccgaggtgcacccaggcctagaaccagggtcgcctgggtccacggggcccagctcagggactgatgggaaggcacttttttcccatgggagacccaggccccacttctccgtggcgcggtttctttttcttttctgccacaagtgtctcacctctcctccctcacagctcaccttcctctcatgggctttccaccgcgttggggtacccctagtggcccgaggctctccctgagctcgaaccagggactctaggttccccggggcccagtgcaggggctgatgggaaggcactttcatccgtggggtacccaagccccacctctccgcggcgcgggtttcttttttttctttttctgtgacaggtgcctcacctctcctccctcaaaactcaccttcccctcacgggctttgtgtccccaaagccccccttggggtgcacttagcggccgaggcacaccctgagctcgaacgagggacactagggtccctgggtcccagtgcagggactgatgggaagacactttcgtctgtggggcacccaggccgtgcttctccgcggcgaagtttttctttttttctctgccccaggtgcctcaccttccccttaggggctttctgcccaccttggggtacccctactgtcccaaggcgtaccccagggtcaaaccagggacgccagggtccccagggcccagcgaaggggctgatgggatggcactttcatccgtgggggacgcaggcactgcttctcggctgagcgttttttttctctgcctcaggtgcctcaccttcccctcatggaccttttgttcgctttgtggtaccccaagctgtcccgaggcgcaccctgggctcgaaccagggtcgccagggtccaccaggcccagcatagggcctgatgggaaggcactttcatccgtgggggacccaggccccgcttctctgagacgcggtcctcttttttttttttttttctctgcccctggtgcctcacctctcctcccacaaacttcaacttccactcatgggccttctgtccaagttggggtacccctagtcgcctgaggcacaccctgggcgtgaaccagggatgcccgggtccctggggcccagcgcaagggctgatgggaaaaaactttcgtccccggatgacccagacaccgcttcgcggcgcatttttttttcttctttgccccaggtgtctcaccttcccctcatgggccttctgcctctctgcgtctgcgccggcgctgtgggcctctctgcgcctgcgccggcgctgtgggcctctctgcgcctgccccggcgctgtgggcctctctgcgcctttcgccagcgctgtgggcctctctgctcctgcgccggcgctgtgcgcctttgcgagggcggagctgcgttcttcccagcacagacaaggagagcatcgccagggcggagctgagttctcctctgcacagacttcagagatacagcgaaggcggagcagtgttctcctcagcacagacccaggcgggccgggggcaccgcgagggcggagctgcgttctgctcagcacagacccgggggacaccgctaaggcagagcagcgttctcctcagcacagacctttggggcactgcctcgctttgggacaactcgggaccgcatagacggtgaataaaatccttcccttttgcagccctgaataatcagggtcagagaccagttagaagggctcagtgtggaaaagggaaaccaaaagcccctctgaatcctgccaaccgaggttctccccagccaagccaaggcagccgcagtgcgagatccacaccgcagcctcggaagacaaatgcagcattcctaatgcagacatgacacccaaaatatgacacccccattgctcatgtaacaagcacctgtaatgctaatgcactgcctcaatacaaaaatattaatataagatccgcaatccccttgctgctatgcagtcctaagacagagatcataataatcaacattgacatagtacaaacgtagtaaagaacctagggttaaggttggtgttagggttaggggttaggggttaagtttagggttaggggttggagataggggttggggtcagagttaggagttaagagacaacgtttagagttagaggttaagagaggttaggggttagggataaggggttagggttggattagtgtgagggtgagggttgtggttaggggttaggcttaggggttacggttaagggttagggttaggggttagggttagggtcaggggttagtggtcaggttcaggggttagggatcagggtcaggggttagggatcagggtcaggttcaggggtcccactctttgagttgtccatttactctgctgactgttccctttgccatgcaaaagctgtttagtttaattaagtcccagctatttatctttgtttttattgcatttgcatttgggttcttggtcttgaaatccttgcgtatgtcaatgtctagaagggtttatccagtgttatcttctagaatttttatagctcaggaattagatttaagttcttaatccatcttgagtagatttttgtataagatgagagatgagaatccagttttattcccctacatgtggctcgccaattatcccaacatcatgtgttgaaaagggggtcctttccccactttatgtttttgtttactttgtcgaagatcagttggctgtaagtatttgggttaatttctgggttctctcttctgttccattggtctatgttcctatttttaaaccagtacgttggtgttttggtaacaataaggtaagccttattgtacagtttgaaatcaagtagtgtgatacctccaggttctttttgcttaggcttggtttggttacatggctcttttttggttccatattaattttagaattgtttttgtaattctgtgaagaatgatggtggcattcagatggggattgcattgaatttgtagattgcctttaacagaatggtaattttcacaatattggttctacccatccatgagcatggggatgcgtttccatttgtttgtgtcatctatgacttcttttctttcttgtttttttttttttttcagagggagtttcgctcttgtcgctgaggtgggagtgcaatggtgtgatctcggctcactacaacttctgcctcccgggttcaagcgattctcctgcctcagcttcccgagtagctcggattataggcgtgtgccaccgtgcttggctccatctatgatttctttcagtagtgttttgtaattttcattgtagctgtcctttgattcctttgctaggtatattcctaagttttgtttttttgttgttgttgtttgtcgcagctattgtaaaaggggttgagttcttgatgtgattctctgcttggtagctgttgatgtatggaagagctacggatttgtgtcccttaatcttgtatctggaaactttgctgaattcttttatcagttctaggaagtttctagaggagtccgtagggttttctaggcaaaagattatatcatcagcaacaagtgacagtttgacatcctctttaccgatttggatttcctctatttccttcttttgtctgattgctctggctaggacttccagtactatgttgaagaggagcggtgagagtagtctccttgtcttgttccagttctcaaagtgaatgctttcaccgtttccccattcagtattatgttggttgtgggtttgtcatagatggcttttattacattaaggtatgtcccttgtatgcctattttgctgagagctttaatcataaagcaatgctagattttgtcaaatgttttttctgtacctgttgatataatcatattagatttttttaactctgtttatttagtgtatcacacttattgacttgcatatgtgaaactactcctatatcattggtataaaacccacttgatcatggtggattattttttgatatgttgtcggattcagttagatagtattttgttaaggattttggcatctgagttcatcaaggatattggtctgtagttttcttttttggttatgtccttccatggttttggtattagggtgatgctggcttcatagaatgaataaggagggtttcttctttctctgtcttgtggaatagtatgaaaagatgggtatcatttcttccttgaatgaaagaagacattctttgaatgtctggtagaattctgctgtgaatctgtctggccctcagctttttttgctggtaattttaaaattaccatttcaatcttgctgcttgctttattggtctgcttggggtatctaattcttcctgatttaagctaggggagttgtatttttccaggaatttatccaactcttctaggttttgtagtttatgtgccaaaaggtgttcatagtacccttgaataatctttaatatttcagtggtgtcagttgtaatatcccctgtttcatttcttagtgaggttatttggattttctctcttcttttcttggttaatcttgctaatggtctaccaattttatttatcttttcaaataaccaactttttgttttatttatgttttgtatttgttgttgttgttgttgttgtgtcaatttcatttagttctgctctgatttttgttatttcctgtgtttgctgggattgggtttggcttgttcctgcttctctagttccctgagatgtgaacttagattgtctgtttgtgctctttcagactttttgatgtaggtttttaggactacaaactttgctcttagcagtgcctttgctgtaccccagaggtcttgataggttgtgtcatccagttcgaagacattttttacatttccatcttgatttcatttttcacccaatgctcattctgtgaggaacaaccaaattgttttccgcagcaagggcatcattttctattcctagcagccagatcatgagggctccaacttctccacctccttagcaacatttattttctctgtcattgttatgaaagccttacttgtggatgcagagtggcatgaatgaagtcaattaacacgtttattacctcacagaatagtcaccttttgggtgcatgggtgggataagaaaacttaactccatcccctgtgacggaatagtggccattccagctgctccaggctccagcagaggaagaccggggtatgtggccccaccagggtgaccctcaggcctggcgcgcacgcattccagaggccacccaaaccatgctctgccatctgggcgcccaagctgccgtcgccccctgtgtgcaggcagcatctgcctggcaacccccgagcccgctcgcgctcctagcatcacagaagcagggccacgtgtcccagtggctgcagccaagccaggcattctgccctgcggcagcagctgcacaagagcgagaactgagaacccaccgctcaaccccacacgaggtgactgccgagtgcccatataaacggctccgatctccctcaggtggaggagtggtcgggaggcatggcctgggggccctcaggcttggcgcgctggcgatcccaaggccgaccaggccatgcacctccagcctgcctgggcacccgagctgcagccgccttctgcgtgcaggcagcagcctccaggcaactcccgagcccgcccacactccccacatcttggaagcagggccaaatgtccctgtggctgtggccaagccaggcggtctgtactgcagcagctgcacaggggcgggaaccgaccctcagccccatccccggtggctgcagagggcccctggatagagatctggagctctgacagaggaggagccgggccagggcagggtctggcaggctctcaggccaggggcacccgcgatccagaggccgcccagggcatgcttcaccacctgggagcccagctacaggcgccgggcgactcccaagctggctggcgcgcccagcctcgcagaaccggagctagatgtcgccatggctgcgaccaagccaggcggtctgcccaggggcggctgcaccggggcaggaaccgaccctcagccccatccccggtggctgcagacggcccctggggcggccccgatctctcttcggaggaggagaggggcgggagtcacggccaggcggaccctcaggcgggaaggagtgcgcgcctgtgattccgggacgtcccgcgccagcccaggagaacccgcaagccagcggcgcctgtttctctgtgtgattctttgaggaaccaccaaactgttttccacagcaagtgcatcattttctattcctagcagccagttcatgagggctccagtttctccacctccttagcaacattgattttctgtgtcgttgttatgaaagccttactagtggatgcaaagtggcatctcatttgggttttgccttgcattttattaatgaataatggtgtttagcatcttttcttttccttcttagacatttgtgtatcttctttggagaaatgtctgttcaagtcctttgcctattttttaattgggatcttagaaattctgttgttgagttgtggaatattaagcttttatcagatacacattttgattttatcagatacatattttctcacatattatgggttgtcttttcacttccttgatagtatcctttgatacataaagggttttttattttgattaaatctaattttcgtgtattttcttttgttatctgtgcttttctgtcatatttcaaaatacacttaaaactcaaaggtcataaaggtttaccgtgtgttttcttctaagagttacatatttttagtccttacatttaagtattttattaatttagaattaatttttgtatatactgcaaagtaggggtctaacttctctcttgtgcactgacatccagttgttgaagagactgttctttcctcccttgactagacttggccaccttgttgaacagtcattgaccatatatgtgaggactaacttgtaggatctcaaatctgttctattgtattggtctgaaagtctattggtcttattccagtaccacactctcttgattactgtagatttgtagtaggctgtgaaactgaaaaatgtgagttttccaatgttctttttcaagactgttttgtctgtcagatcctttgaatttttgtatgattttagaatgagtttctttgtttctgcaaaaatgcctttgggattttgatggtattgcattgaatctgtagattactttagatggtattgtcatcttaacaatattgtcttacaacccgtgaacacagaatgtctttccacttatttccactctctttagttttttgcagcaatgttttatgtataccaccatggttagatttatgcctgaataacgtattatttgatgtcattataaatggaatttttaaaatgttttcatagttctttacaactatatagaaatatagctcatttgcctatgtttgtttgcatcctgcctcttttattagttataatcggttttgtgttttgtttggagctttatacccataagatcatgtgtagatataattttacacctattttttatttctaatttagatgccttttatttctttgtcttgcctaattgctctggctagaactgccagtgctacgttgaatacaagtggcaaatgcaccatccttttcttctagatgttaggaaaacagctttcagtgtttcatcattgatcatgatattaactgttgggtttttgtacatcccattgtcatgttgcagaagatcccttctatgcctagtttattgagtatttttattatagaagggtgttgtatttcatcaatgttttctctgcagcaattgaaataatcacgtgcttattcattttactgttacagcatattacactgattgattttttatatgttgaaccacccttgcattttggggataaatctcaaagggtgatagtttacaatcctttgattatacagtattgctgctgctagtattttgctagtattgctagtattttgctgagatttttgcttatatattcataagggatatagtgctgtatttctctcttttgtgctctctttgtctttggtataaggataatgctgttatcaaaaaatgaattagcaagtattccttcttcatatattttgtcagaagagtttgagaagaaatggtattaattcttctttaaatgttaggttgactcaccagttaatgcagctatttggtcataaatgtttctttgttaatcgctttcgattactaattcaatctcctaggttataggtctattcagattttctctttcttcttgagccactttggtagtttgtgtctttctagcgattcatccatttcatccagggcacctaatttgttgctagacagttgttcacagtatactcctgtaatccttttgtatttctgtaaagttggtagtaatggctctgctttcatttatcattttaataattagtcttccatcttttgctcagtcaatatagtgaaaggcttgatctttcaaagaatctacattttttcattctactgctctccaaccttctgttttattgatttatgctctaattatgctctttattatttctttccttctgctagctttggatttagtcttccacctggatttattttgagagtgatattgatgtaacttcatggaaataatactagatagaaagttagcagatagattctctatctgatgagagtttggtgcaagtcgagtaccaggttaccaagttttatttttttctctgacccaaaaaacaatttggcagccggtgagaaactctcacagctctggatgtgagtttaggacactgcatttctagcattcaatttcttaatacttttttgcacagggatcatggcacaatttgcagtttccaccctgcccatggaagatgaggagtccatggaagatgaggagtctgttgaagatgattccgtggagagcaggatggtggtgacatttctcatatcagctctcgagtccacggtgagaccttctgttctaacatgatataatttggtagaactgggtggtagataaggttgattttttttttgtagaacttataattttatgatttgtagttctaatgagtagatctttttctggaatagtagttatgttcaaacacttctaaccaaatgtgccatgttgtccagtctggtctcaaaatatggggctcaagagacctgcccaccttggcctcccaaaatactgggattacaggtgtaagcccctgaatctggccagatatttttctttttatggctgaataatactctgtgtatgtatatattacattttctttatctattcacctactgatgggcattaggtttgggctaccttctggccactgtgaataatgctgctgttaatcgggtgtacaaatacctgtttgagtccctgctctcagttcttttgggtatatacgcttaaagggtgttgatggatcatataattctatgcttcatatttttaaggagctgctaaaccattttccacagtgggctgtaccattttacattccaaaaagcaatgcatacagcttccaatttctctatagcattgctgacagttaatattttctgtttatgtattgtatttttatagtgtttgaaattaatctgaggcttttcactgataccaaaatattaggaaatgttttccaaaaataatactgcttattatagaggattttacgtgttacttgatgccctgtgatctgttttctaagtaagaagaggaacttcttggctgggcacagcggctcatgcctgtaatcctagcacttttggagaccgaggtgagtagatcacctaatgtcaggagttcaagaccagcctggccaacatagtgaaacccagtctccactaaaaaaaaaaaaattagctgggtgtggtggggggtgcctctaatcccaggtattcggaaggctgaggcagagaattgattaaacccataaggcagaggttacagtgaccgagattgcaccactgcaccccagcctgtgtgacagagtgagagtccatctcaaaaaaaaaaggaaagaaagaagaagaacttctctccatccagcctcattccactacaccaactcttctgtgtctggttgtgcaggggagaaagggagcttggcaactctttgctgtgttgagttgtggtagcccatcactgggttgtaaagtgccttgcctcctttcctcccctccttttttttgagacagagtctcactctgtcgtccaggctgaggtgcagtggtgcgatctctgctcactgcaaccttagcctcctgggttcaagtgattctcctgcctcagcctcccaagaagctgggactacaggcacatgccaccacacctggctaactttttttatttttagtagagacagggtatcaccatgttggccaggctggtcttgaactcttgacttcaggtgatccacccaccttggcctcccaaagtgttggggttaaaggcatgagacactgcgcccatccacctcctcttttacctgggagaaatgcacagattctgggtgccatgtgcatttgttttgggagtgataattgatctaacttatggaaataatactagatagttagcggatggattctgtatctgatgagagttttgggcaaaatgaattcctagtttctgagtcttatttttcccctgattcaagataactgtgaattatccagccagtaaaaaactctcacagctctggatgtgagtttaggacactggatttctaccactcattttcttactacttttcttgtgcaaggatcatggcacaagttgcagtttccatcctgcccattgaagatgaggagtctgttgaagatgaggagtccttggagagcaggatggtggtgacattcctgtcagctctcgactccatggtcagaccttctgttctcacattctgtagttcggtaggactgggcggtagataaggttgatttgtttttgtagaacttacaattttgtgatttttagttctaatgagtagaactttttcatgaatagtagttacggtcaaacacctctgaccaaatgtgcatgtggagtttctacactgattttcagacaatctggatcccaactgggtatcccacaattccatcctgacactccctggagttagtgcagaccctgcaggatgggagctcagtcccaggagtctaccctcactccacataccaattgcaagtcttgggttgttacatgtagttttgaccaaccagttagaaaacagggtttcatgacccccattggtgggtggaatcatttgctcggacagcttgcagaactcagaaaaacagattgttttcttttttttctgagatacagggtctcagtctgttgccaggctggaatgcagtggtgtgatcaaagctcactgtagcatgggactcctgggctcaagtgatccttccacctcagcctcccaaatagctgagattataggcctgtaccagcatatctggctatgttcttttactttttgtagagatggggtcttgttatgttgcccaggctggtctcaaatttctgggctcacgtgatcctcccaccttaacttcacaaaatgctgggattatgggcatgaaccactgcatctcaccaatttactttcttttactggttcattttaaaggctaaatctcagaaacagccagtgaaagagatgtacatgctgggcacagtggctcatgcctgtaatttcagcactttgggagactgaggcgggagcatcacttaagtgctcaggagattaagaccagcctgggtaacaaggtgaaaatgcatctctacaaaaagatttttctaaaaattagccaggcacagttatctatagttctagctactcagtgcctataattctagctactcaggaggctgaggtgagaggatgagaggatggggcttgagatagggaggcatagttcgcagtgagccatgattgtgccatgacactctaggctgggagacagagccagactctgtctcaaaaaaaaaataaaaaacacacagggcaaggtatgtcgagaggggtacagaacttccatgtcctctattgtgcatattacattcctggtatctcccttgtgttcagcaacccagacattctccaactccagctgttgagggcgcttatgaacgcttcattatgcaggcatgattggtgaagtcattgaccattggtgattaagtcagtcttcggccactatttcttcctggagcccagggggtgagactgacagttccaagcctctaatcacatggtttgttcttctgacaacaaccacccctttttctgaagctgtctacaagctttcagtcacccagtcatctcagtaacatcaccaaatgcattcttactatggtgatcccaaaggtcttagaggctcttgtgttagaaacctgggactaagaccaaatattgaaacagaagatgccccatcactttcatcaccaaggcctttataagagcttgagaagctctttgccaggatgaggggcagaaaccaaatgtgtatttcttttctttttcttttgaacacagagtctctgtttcacccaatctggagtgcagtgatggtgttgtagctaactgcagcctcaaccacctgtgctcaagcaattctcccacctcagccttccaagcatctgggactacaggtgcacaccatctatgcccagctaattgttgtatttttttgtagagataggatcttgttatattgccgaggctggtcttgaactctggggctaaagcgatcctttcaccacaacctctcaagtagctgaaactacagatgcatactaccatgcccagctaattttttcttatttctttttgttgtttaattgagggggtctcgctgtgtttcccaggctggtcctgaagttttggcctcaagcgtttctcctgctttgaactcctaaactgttgggattatggttgtgagccacggcctctgtgtccagcaatcacaagaggtctttataagtgaaagagggaggtaagagagtccgaattgaaggagatttgatgatggaagcacaggtcacagagggagatttgaatatgctttgcttcaggctttgaagatgcagttaggggccatgagccaaagaataggagtggctttagcaactgggaaaggcaagggaacatattctctccagaacctccagaagggatgcagtcctgctggcaccttgactttagccttaatagacctattttggacttctggcccccagacctcttagtgagtagatttgtggtgtattaagccactcaatgtagggtagtttgtaacagcggcaagaagaaatgaacatgaagccagaattggtggcccacacctataattccagctatttaggaggctgaggcaggatggttgctttggcccaggagttcacgataagtctgggcaacaaaatgataccctgtctacatggaaaaaaaaaaaaaattagcgggtgtggtggcatgcacttgtagtcttagctactagaggccctgaggcaggacaatttcttgacctaggagctccaggtctcagtgcgttgtgatcgtgccatggcaccccagtctgagtgacacagcgagattatatcttagaaaaaaaaagaaaaaagaaatgagtgagcatggcaggaatagggacagatagcaatattaaatagagtggtcagggttggcctcctaagtgaaaattgagcaaagacttgaaggaggggaaggagctggccaaggtactgagggaagagcattttaggcagaaacaacagaataaagatgctaagagggaactccgtggtgtgtctgaagctcaggaaagaggtctgtggagtagagagagggagagaagtagggaaggaggccagggagttgttggactcagatcagtacagattgtgtaagccctgggaggctattgctggggctttggtttttattctgtctgagatgggagatgcggaagggttctgagcagagagttgacacgaactgtctactgatttaaaagcatcccatggcagctgagttgacaaagattgtgggaagatttgggtagaagcagggaggccatgctgtggcaacctccaggtgggagatgatagtggttctgaccagggccctggcaatggtgagagatggttgattcttgttgaaatgttaagtaattaaaaaaaaaccactactgcttttcccaattatatgaagtatgggatgctagattacagagatcttaagtcgggccaggtgtagtggcttatgcccgtagcttcagcactttgggaggcagagatgggagaatggtttgagtccaggagtttgagaccaccctgggcaacacagcaagacttcctgtctatgcaaataaaaattaataaaatataattatcccggcatagtggtattttcctgtagaacctgttacttaggttgttgaggtgggtagatctcttgagggcgggagtttgaggccagcttgggcaacatagcaaggctcctctttctacaaaaaaaaaaaaaaaaaaaaaaattagctgggtgttttggtgttcatctgtagccgtagctatggtgagggtgaggcaggaggatccccggagcccaggaggtcacggctgcagttagctatgagtgcacccctgcattgcagccagagtgacagagtgagacccggtctcagaatacagatacaagtaaagaaatctcagctcagagcagtctgtttgtcactatgcagcctttgcaaccccatagctgcgcgattgggtttgtgttgctggaggtgaggagacccgtgcccaggtgttgttgcctgtctaatcagtttattttaaaatatattaatgaaatttatttcatcatactttatggcctcatacctgaatggttttttgaattctcctttgaatagcttgtaactattcaaacctcttattgattctataattaattctttttctaattagctttttaaaaatcagaattgatattagactaatcagttattaatgaggagatgaaattgagttgtttgtacactttatctaagatagtgttatattggctaactcaaatcagtagttcagcaaatgcagaatcagagcttcttcagcgtggaactctcttgtggttcttgaagatgccatttctttcttttttttttttgagacagcatcttcctctgtcaccaggctcgagtgcagtggcacaatctcaattcacagcaacttctgcctcccgggttcaagcatttcttttgcctcagcctctgaagtagctgggactacaggcacatgccaccatgcccggctaagctttgtattttctgtagatacggggtttcagcatgttggacaggctggtcttgaactcctgaccttgtaatccactggccttggactcctaaagtgctgggattacaggtgtgagccaccgtgcctggcctcttttttcagtctttaataaactgctgccatcatttcagaccacttgctattttaggcacttagaaatttttcactggaattcatgtaaagaaagaccatgggtgtttgtactggatttagtattcatccttcgactgcatgactcacccctagtgccataattttactaaagaatttttcagatactactcagctggccactgaacctaaccagcaacccaccctcaaccattcagtggtcttttgttcttctatgttcctcctgaatgttgattactctcagaaggtgataaaaacttggatttcttttttttttctttctagagacagggttttgttctgtcacccaggctgcagtgcaatggcatgatcatggttcactgcagcctgaaaccccggactcaaacagtcctcccacctcagcctcccaagtagctgggactacatacatttgcccctattcccagctaacttctttattttttattgtacagatgggatcttgctgtgttgctcaggatgttgtcagactcctggcctcaagtgatcattctgcctcagcttcccaaagtgcttggattatatgtatgtgggagccacctgtgttcaatgcccattttctttttctttctttcttttggagacggactctcactctgtcatgcaggctggaatgcagtggtgtgatctcagctgactgcaacctccacctccctggttcaagcaactcccctgcctcagcctcccgactagctggaattacaggcccatgtcaccactctcagctaatattcttgtatttttagtagagacagagtttcagtatgttggccagactggtctcgaactcctgaaatcaggcaatccacccaccttggcctcccagtgtgctgagatcagaggcgtgagtcaccacaccatgcccagccatttttaaaataataacgttattgaaatatgattaacgtatcatgcaattcatttatcaaagtacacaattcaggccaggtgcagtggctaattcctataacgctaagactttgggcagctgaggcaggtggatcgcttgtgttcaggagtttgcgactagcctgggcaacatggcaaaacagcatctctagcaaaaatacaaaaattagcttggtgtggtggctcatgcctgtagtcccaactacttggggacatgagactggaagatcacttgagcccagaagccataggttgcagtgagaccagatggcaccactgcactacagcatgggtgacaaaaggagaccgtctttaaataactaaagaaaaaaagaaagtatacaattgagtggtttttagaatattcaaggagctgtgcatccatcaccacagtctttcttagaagtgattacccacttgtgagttacccacttatgagtgagaaaccctcacctcttagccgctacctcctacgtaccccatgttcataggcaaccagtgatttattttctgtcattgtagttttgcctaatctggaccttttatagaaatagaattgtacaatgtgtgatcttttgtaatttgcttttttttctcttagcagaatgttttcaaatttctttcatgttatagtgtgtatcaggatttctttccttttgtagctgagtaatattttatgtttatccattcattagttgatggacatttgtgttgtttttgcgtattcaccatcatgagtcaggctgctatgaacactcgtacgtaagttttagtgtgaacatatatttttatttctcttggatttacactcaggagtgaaattgttgcattatgtgattactatacatttagtctttgagaaactgccacgttgtttttcaaagtggttacactggtcaggcacagtggctcacacctttaatctcaggtatttgagacgctgagtttggaggattttcttagctcgggagttcaggaccaccctgggcaacatagggaaacaatatcttgattttttaaaaaaatcaaatgccaagaaaacacccaaattgattacaccattttatattcccaccagtaatgtatgtgagttccaagtattccaattgtcaccaactttttttttttttttgagacaaaatcttgctctgttgcgcaggctggagtgcagtgacatgaacatggccagtgcagctgtgaccttccaggcacaagtgatcctctcacctcagcctcctaagtagctgggacttacaggtgcatgctatcatgagcagctgatttttacagtttttggtagaaatggggtgttgtcatgtagcccaggtttgtgtcaaactcctgagctcaagtgatctgcctgcttcagcttccggaagtgctgagattacaggtgtgtgccaccatgcccgactggtgtaaccactttggaaagcagccactgagcccggccttcaccagtataccaatatttgttaatatcgttttattttttacaatttttaaatttttaaaaacttattattttacctgtattattgattataataaacaacgaataattttgtagtagagttgagtccccccaaaaagtatttattgtttaactgaagtagttttttttttaacctggatatatattttttcattttcactttatttttagtgtttatttttaaaaattatttatatgtatttttattttaataggtgtttgagaaacaggtggtgtttggttccatgaataagttcttcagtgtttatttctgaaatgtagtacccctcattactcattaaattatatattaagtcattataaaatcattaataaaccaaggactttagtaaaatgggaattttattttaacttgcaacctgggacgtaactgtcaaaaaaattagagaaattaccacattaaggttttcaaatcttgaactgaaaaatgaaaaccttggtgcacctaagaaccaccagcccactggtcaaagtgaacaaaactaaatgaaaaaataaaaccaagaaaaccaaactcaggattattaggtattctgtaatgctattttatctttggactcacagaaaataattattattattattactattattattattattattattttgatatggagcctcactctgtcacccaggctggagtgcagtggtgcaatcttggctcactgcaacctctgcctcctgggttcaagtgattctcctgcctcagccttcagagtagttgggattacaggcaggttccaccatgcctggctaacttgtatttttgatagagacagggtttcaccatgttggccaggctggtctgaaactcctgatctcaagcaatctgcctacctcagcctcccaaagtgctggaattacaggcatgagccactgtgctcagctgaaaatagttaattttatgtatatttcaagtcagaatacaacctatttttgaatatttgatgactttaggatactatattaaatcttaattgaattaatacaagtttaggtgtaaagatgatgtttatgttgacaaaaattattagtgttttacatatatgaaagtaacaatatcatatatttttcgtacttgtagaatactttgaaatctattattagctaacattttatattcattttgggttttcacattattgttagatccagagaaaagtaatattttctgaatactcaaatcataaacattttgctggatgcattcatagatactttatttaaaaagtacactaattgaagttttacaccattttatgattcatcaaacacagcaactgaatactggcgtatagcaacatttcagatgatgttagtctaagataaaactcataacacattttaaaaagggtaaaaggaaggaaaggaaaaaggatacaaggctgtagaaagattttaaaaacaaacgtcgtatgtctgaacctttgcctggagtttcatattttgtgaaaagcagtttgtaagtagaggactcgtaagtgcacctagtacactgcaatggcacagacacggcagatagtcaataaaatgatctttaacttctgatctaggttatttttgttgttgttcatgtattaacctagtgaaactcagccaatagatggagtggcattgacctgtacaacttccaaaatcccatccaaccttagtgtcctctgaagttctccataacttattgtctgttcctaccaacatttagcataagctacagcttatattgttaataattcttctatgtttatgtgctgacttgcaaataaatgggcctatatagtctttatctagtgttggattgggatcaaaagcttcatgaaatcattgtttttagtatacgtacagatggataattgtataaataagtacagatgtgtataaatgtgtgagtatacatacatatattttctagctcctctaacaaaagggcctagaaacaacatcatcccagtaacaatgagaacaccactctccaattaaaggaaccaaggctccttggggacatatttgatatcaggattgggcagggaaaatacaagattagtttgaaatattttgtcatgttaggaagtaaggaaatgctcacaaaatggggaaaatgtgaaagggaaacagatccactttgaataaacttccatagccaaatttgagaaaattggggcaataaaatagataacaatagtaatatattacaatctacagaagaaaattttcaattaatccaggccgggtgcggttgctcatgcctgtattcccagcactttgggaggcagaggcgggcagatcacttgaggccaggagttcgagaccagcctgaccaatgtggtgaatccctgcctctactaaaaatacaaaaattagccgggcatggtggcacatgcctgtagtcccagctactccggaggctgaggcaggagaatggcttgaatcccagaaggtggaagtgtagtgagcggaagtcgcaccattgcacaccagcctggatgacaaaacaagactccaactcaaaaaaaatccatattgacataaataataaaccaaagattgagaatgggtagtattttattacagtaagatttcattaaatgtaggagacataaaatataagaatcatcactttgcaaatatcatagtaataattgttgcaagaaagaaccttggagggatgctaagattagtggtgagtatatgttgggaaagaacatatttgcataatatgaaagtatcttcccacaagataattacagaatagtaacttcaaagtggagatgtcaacttagccaagtgatcaaagttaacattactaataataagataaatgaacttcatgtaacttcttatatgatgcactgagtaggacaaaacatcaattctatggtattcttagacaaaatgtataactttagtcctaaccgtgagaaaacatcagactaactgaaattgaggagggacattctacaaaataactgccagtattcatcaaaagcattttagaaagactgaggaattctccagagacatggaggcatgttatctaagtgcaatggagaacatgcattgtatcatgaaccagagatggacaacagtaggatatgtacaataacaccccaacatttgaacattacacaaaatacttcagaaaagcctattggccaagaaaagtttcacacacaaaaaaaatagtttaaactgaaagaaaattttttaaaaacttaataaaatgtgggatgcagataaatcgtttcttaaaggtacatttatagatgtaatatattgaaaataaaaggcttcaatcaatgacctttaggttcttttttaagaggctaaaaaatgagcaaagtatatccaaattaagaggaaggaagatgataaagataaaaatgtaaaccaacaacatagcaaataacaaaaggtggagctaattaatatacccacaaattggttctttgaaaaaaattttttaataaacaatggctagcaagatttatctcgaaaaaaattacagaagctacataatgtagataatgggaattaaatagaggatgtaactacagaacctacagacatcaatataattatgaaaactttaggccaatacatttgacaattaaaataacatgggaaattatttgtaaaactaattcttaaaactaatgcaaaatgaaatagaaaaagtaatagcttctctatgtattgaagaatttttttaattaaaaaagatttctataattacaggctacatgctttctcaggtgaattctatcaaacatttaagaaagtacagagagtcctcaacttacagtggcttgacttgtgctcttcttacttgataatggtgctttcatctgtgtacgttaatgatgagcatcaatatgaccagtttttcactatcagtatagttttcaataaatttcatgagatactcaatattttaaaatgggccttgtggtagatgattttgcccaattgtaggataatgtaagtgttctgagcaagtttaaggtaggcgaggctaagtcatgatattcagtaggttaaatatattaaatgcgttttagacttacaatattttcaatttaggatgagttcattaagacataaaacaattgtaagttgaggagtatctataacatcaatcttgaacggactctttttaagaaatagaatttaagggccggacacagtggctcacacctgtaatcccagcactttgagaggccaagacgggcagatcacctggggtcaggagtttgagaccaacctgaccagcatggagaaacccccgtctctactaaaagtacataattagcagggcatggtggcgcttacctgtaatcccagctccttgggagacagaggcaggagaatagcttgaatctgggaggcagagattgtggagagccgaaattgtgccattgcactccagcctgggcaacaagagtgaatctccgtctcaaaaaaaaaaaaaaaaaaaagaaaatttaaagggacatttcctatcttattttatgaacccagtattgccgattccaaatcgagacaaaggcattatacaactttgatgtttatccctcataaacatagactcaaaagtccttaaaacataataaccaattgaatgtagcagtacatagaatggataataaactgtgaaccaattaaatttctagcaagattgcaaagttaatttattatttgaaagatcagtttaatcaatttcattcacctggatggttacacctggcaaaactcagcaaactgtgcactttaaaatagtatttattttatgtaaattatgtttcaatacaattgattttttaagaaaaaaaaacgtttcccagagtgatcaaagtggagggcagggaacagtaaacatcagtgcttatgttatagctactaaaagcctcccaattccaacgacatgctttcaagcaggtctgatccttcccctggaggatacctctgacccaggtgtgctacaaatgcattgcccctagttgcttctgtcaccttagtgatggaagtgacaagagggtactggagaaagaaaaggtgtacaaggttccaaatgtacattctatttccaaaggacatttgtgaagccagtggaaagcgaacaaacaagctgctaaataagtcacaagtgtgttctcgtacagttttgcgattaactaaataggacattcaacagataaaatttgttttacatagttactcctctaacaggatgaacttgtggattgtgagataggactgatataacctgttttctctctgcctcttttttttcccccaagttttgtgtgcaatacattaggaaaaatataattgggctacaaagctacaaaaatggcttcctggcagttccatgcttgtttccatgtggtgcctatgtttggcactatgttctcatttgcactttcctacttgattagttaatgtatgaaggacaagcctgatctctactgtgaatttttaccaaggtattctagtagaaaaatgagtatgtaatggtgctgtggaatgctaaagtgtgtaaaacattaagaatctaaaaatttgctcatttccaagttttgtcccagagcaactgtgcactctgattatatcgctactgctatttaaagttatccatttgcatgtctaaaaaatagattcatactgattgtcccattttgatctcaaaaaactcctgaatatgagagtcgtgatcaagggacgcttcatgaaatgttccaaagttaaagtgtgcaatgaaaccagatttatcatagccttatttaaaataattatttctaaaattgttattgtttaattataaacggtatcctttcaggatacttggaagatccatagcagtgtttttattttcacagaacaagcataaattatttatgaaataataactcagatacagagattacttcctattggccttacatatgaatataaataaatacatattatgaacatgagcatacttattttataattatgtaaacgtgtgtgtaatgttatatataagttcaataaagtcatgcttatacatggtttcaattcatgcttctaaaaaccactcaatgtagtcattatcatatgttaataaataatctctgaaaatgtgcttctagtagttgcacaatatcccatcataaagattgtcatgctgtttttaaatcatacttttgggtatataagttatatctgatatttttctgctacatatatactattataaatctattagtagctgattttttgtcaacacatatgattgtttcctcacaatagtacaagagttggttgtaactttatttccttccaacatttattttaggttcagcgggtacatgtgcaggtttattatatgggtaaaatgtgtgtcaatgggattggtgtacagattacgtagtcatccaggtagtgaacgtagtatctaatagggagttttttgatcctcactctcccccaactctccacccacagtagaccttgtgtctattgttcccttctctgtgtccatgtggactcaatgtttagcccccacttataagtgagaacatgcagtgtttgtgtggttttctgttcctgcattaattcacttagaataatggtatccagctccaatcatgttgctgcaaaagacattatttcatcctattttataggtgtgtagtattccatggtgtatgtacgctgcatttttttaatccagtcttctgttaacaggcatctaagttgattccgtgtctttgctattgtgaatagtgttataatgaaaatttgcgtacatatgtctatgacagaatgatttatattcctttgggtatatacccaataatgggattgctgggttgaatggtagttctgttttaagttatttcagaaatctccaaactgctttccacaatggctgaacaaatttacattcctgatgaaactggagacttccctgactccccttggcaggatgtgcaacaggggtgtggcttgtctggccaccgtgtgtgctgtcaaaccccttactgggcagggaggcatgcagacaggcaggtgcaataggcagggcaagtggccatggtactgtctaggggtgggttcctgcgactcccacagcccaagtgggcatgtgttacagtgcactcttttagctttgccatccacagatggcttaagtgttaacctgttcagtgccctcttggtacccagttccttgtccagcatccagaaagaattaagttgcacacagacttgaggatggtgaatgtgggggttttattgagtggtggaggtggcactcaatgggatggatgggaagctggaaaggggatggaatgggaagatgatcttccccgggagctttgccatccagaggctgatctctccaaccactgccagccaaactcgtcttggcattcagatgctccttctcttctttctgccacatcattctgcaattctcctcttctgttcatctcctcatctgcttgtctgcttctggagcctggggtctggggcatatatgggtacaggacagggggtgcatggtgagctgaaagacaacttttgggtgcaaaagcaggaatgcctgttcccatttagggccatgggtttccaggcttgtgggcagggctttgccagggaaccactctcttctacccagtagttccctgtctcctttctatatcaccaccagcagtgtataagcattcccttttttccacaaacttggcaccgtctgttatgttttgattttttaataatagccattctgaccggtgtgatatggtatctcatggttctgattttctgatgattagtgatgttgagtattttttcatatggttgtttgccatacatacgttgtcttttgaaaaaagaatccacagacggcttaagtgttaacccgttcagtgccctcttggtacccaagtccttgtccagcatccagaaagaagttgcacatggacttgaggatggtgaatgtgggggttcatgttctttgcctatttgtagtgggtttgttttttgcttattgattctttatacatgctaagtattagacctttttcagatatgtaatttgaaaatattttcttctgttctgtagggtgttctctgttgatagtttcttttgctgtgctgaagctctttagtttcattaggtcccactcgtcaattcttcttgttgcaattgcttttggaatcttcatcatgaaatatttgcctgcgcctatgtccagaatgatatttcctaagttttcttctagggtttatatagttttgggtcttacataagtccttcatccatcttgagttgatttttgtatatggtgaaaggaagggagtgtacatgcccctgtgatattgttcctaatatccaggttgggagaggatattatactcaatattgcaggaagtgtcgaccaccctgaatgttgcttttaatatccggggagagagggtgatattactcccaatatcatcctctccccccacaccctgcatagtacaagcaatatcaaagggggtctgtgcaacacgtgcaatattgggagtaatatcctcccccaacatggatattagaaacagtatcacaaggggttgtacaccacctgtgatattggggagtactatcattttctttccccatggatatgtagaacaatatcacaaaggtggtgtacaacccctgctatattgggagtaatactgtactttccccacctagatattaggaacaatatcacggggggttatacaccactgcaacattgggagtaatatcatcctttccctccctggatattaggaacaataactcatgggtgtctacaccctgttccatattgggattaatattttctcccttgctggacataaggaacaatataacggggggtatacactccttatgatattgccagtaatattatagactccccccagggatattagaaagagtatcagagaggggtgtacatcccctgcaatattgggaataatattctttctttccctggatattaggaataatatcacaaaggggttgtataacccccgtgacattttaattaatatcatcttccccactgaatattaggaacaaattcccagggggttgtacaccacctgcaatatggacagctatatcattgtctctcccccgaatataaggaacaatatcacagggtggttgtacacccactgtgatattgggagtaatatcatcctctaccccctgggtattatgaacaatatcatggggagggggtgtatgccctctctgatattgggagtaatatcatcctgtcccctctggatattaggaatgatatcacagcggggctgtaccttttctgcactattgggagtggtatcaccctctccccctatggatattaggaacaatatcacaaagggggtgtacacatcctgcgatattgagagtaatattgtccactcttccccgagatattaggaacaatatcacaggcggagtgtacaccccctgctattttacctgtaatattattctctcccaacctggatattaggaataatataacaggaggggtgtacaccacctgtgatattgggagtaatatcattctctccccccatggatattgagaacaatatcacaggggcggtttacacctcctgcgacatttagagtaatatcatccttttcccccatggatattaggaatgatatcgcatgggaagtgtacacccccaccatattgggagtaatattttctccattgctggacattaggaacaatatcacgggaatgcacacaccctgcgatattgccagtaatatcgtagtctcctcccaggatattaggaacaatatcacaaggggggtgtacatgccctgtgatattggaagtaatatcatcgactccccccacggatattagtaacaatatcagaagggtgtacaccccttgcgatatttatagtactatcatcctataccccctggatattaggaacaataccacggggggtttatacccactgtgatattgggagtaatttcatcctctaccccttggatgttaggagcagtatcacaaggggggtgtgcaccctctgtgatattaaaaataataccattctctccttctctggatactaggaataatatcacagtgctggtgtgcacctttggagcaatatcatcctctccccaacttgatattagagacaatatcatggggggtggcgtgtaacaccctgcactgttgggagtactatcatctagtcttcccctggatataagaaacagtatcacagaaggggtctacacctcctgagattttgggagtaatatcatcctctccaaatctggatattaagaacagtataatggggtgtggggagtaatatggtgggagtaatacaatcctcctccccacttgctattaggaacaatatcgcaaaacgtgtgtacacccactgtgacatttggagtaatatcaacatttccccacctgctatcatggggagagtgtacactccttacgatattggaagtatcattgtctctcactctcgatattaggaaaaatagcacagggtgtgtatacacttcctgtgattttgggaagaacatcatacccttctgtctttgatattaggaacaatatcacagagggggtgtacaacttctgtgatattataatattctttcttcccatggatattaggaatgatatcccgggcggcttgttgtacaccccctgtgatacggacagtaatatcattgtccttccccctacatattagaaacaatatcacaagggtggtatacaccccctggatattagaaactatcacaggggggctgtacaacctctttgatactgtgagtaataccattgtctcccctcctgggtattaataacaatatcatagggtgggtgtacaccccctgcaatattgggaataatatcatcctctcttcccagggatattaggaacgttatcacaggtggggtttacaccccctgcaattttgtcagtaatattacttctggatgttattgaatatatcacagtgggggtgtacaacccctgtgatatggggagtaatagcatcctctttcccactggatactacaaacaatatcgcagattgtgtacaacctcctgtgatattgttcacaatatttagggaaggagaggatgatattactccacatatggcagggagtgttacatcccctgtaatattgttcataatatttagaagacgacaggatgatattactcccaatatagtaggaagtatacactcccctgtgatactgttcataatttttaggggattagaggatgatattacttccaatatcacagggagtgtacactggtgatattgtttataactttcagtggattagaagatattatccagaatatcacaggggttgcacaccccaagtgatattgttaatatccagtgggaaagaggatgatattactccccatatcacgggggatgtaaacccgtttgtggtattgtcacttacatccgggggggagaggatgatattactctgcatatcatagagggtgcacacggctgtaatgttgtccataataacatccagaggggaagagaatattattcccatgtttcagaaggtgtacacacccctgtgatagtctctgtaacatttagggaagaaggggatgatactactccagatattgcagggggtgtacatccccctgtgatactgttcgtaacgtttagggggaagaggatgatattactccccatatcgaagggattgtacatctccctatatattgtccataacatccagggcaggagaggatattactactccccatatcacagggggtggacacccccctctaaatatgtctaacatccaggcggggacaggaggatatttttccccataacccagagaaagtaaacctcctgtgatattgtccataacatccagtggggagaggatgatatcactccccatattgcagggggtgcacactccactctgatattggccgtaatatccgggggggggtgaagtatgaagtcactacacatatcgcagggattattagtatcagattgtttgaagggctcacagtaagggtagtagtagggcgagttctaactcaaataggggaaatgtgatgtctactagaaagaattttatggagaagggaatgtgggcagaggatagagggtcaaatctgcattcataagggctagatttttctatatatatttattttatacatatatatatttttttctctcttctctacatatatatattaagttgtgggagccaaaatgtaataattattagtaacagggctaatagggtgttgattactagggttaatgttaggtgaattactgtttttcggatgctatcaaaactttggaaatcatggtactatttatactaaaagagtaagatcctcatcaataaatagaaacatacaagaatagtcatactatatctacaaagtgtcgatatcaggcagcggcttcaaaggcaaaatgatgactagatgtaaagtggtattttaattggcggagaaggcagactgaggaatgttgatccaataatgatgtgaattctgtgaaagcctgtagctataaaaaaatgttgagccataaataccatcagaaataacaaagggagctttgaagtattctgagacttgtaggaaggtgaagtaaatatctaatataattgtaacaagtagtgcttggattgtatgtttttgattattttttgttaggctgtgatgggctcaagtaattgaaattcctgatgcaagtaatacagatggattcaggagaggtacttccagggggtcaaggggagaaatacctgttgggggtcaatgccctcctaattctggagtaggggctaggctagaatggtagaatgctcaaaagaatccagcgaagaggaatatttctgagataataaataggactgtcccatattggaggcctttttgaacagttgttgtatggtgaccctgaaatgtactttctcagatacagaacacccttggtcaattgaatacagatcaatcactttaagtaagctaagtccttactaaattgatgagactgaaacccatgaaaacttaacagctaaactccctagtcaactggtttgaatctacttctccagcagctgggggaaaaaaggtgagagaagcaggattgaagctgcttctttgaatttacaattcaacatgaaaatcaccttgggactggtaaaaacaggcgttgacctctgtttttagatgtacagtctaatgccctactcagtcattttacccttttttctcacttcatttatgttggctgacagttgactattctcaaccaaccataaagatatcgagacattatatttattatttggcacatgagcagggatagtcagtacagctttaaattcgagctgaactctactagatgatcaaatttatgtcattgttatagcctatgcatttgtcataattttctttatggtaatactataattggaggtcttggcaactgattagtcccccgataattggcgcccccgatatagcatttctctgcataaataatatgagcttctgactcctcccaccctccttccttttattacttgcatccactatagtagaagccggcactggaaccggctgaacagtctctcctcccttagcagtaaacctaacacatgcaggcgcctctgtagatttcactatcttttcactccacttgacaggtgtttcttctacttcaggggctattaactttattaccacaattgttaatataaaacccccagccatgtcccaatatcacacacccctcttcatctgattagtcctaattacagcagttcttctactcctttgtctccgagtcctagccgccggcatcactatattgttaactgactgcaatcttaatactacttttttctatctggctggcggaggtgatcctatcttatttcagcatttattcagattctttggtcaccctgaagtctacatcctcatcccactgggctttgggataatttcccacgtcgtaacatactattctggaagaaaaaagaaccattcaggtatatgggcctagtgtgagctataggatcagttgggtccttacggtttattgtatgggcccaccgtatatttacggtagggatagttgtggatacatgagcctgcttcacctctgctattataattattgctattcctactagcgtcaaagtttttagctgactagctagctacacttcacggcggtaatatcaaatgatcccccgcaatgctgtgagcccggggatttattttcctttttacagtaggaggcctaaccagcattgtattggccgaggcttatattatggttcattcatatatttagaaacctgaaagtttctaaataagttgtaaaaaagttgtaaaaaaaccccagctgaaataactacgaaggtgcctttaatattctgaagacaaaatagctaagatccaaactgggagtagataccccgctatgcttaactctaaactcgaatagttagatcaacaaaactgttcgccagaacactacaagcaacagcttaaaactcaaaggacttggcggtgctttatatccctctaaaggaggctgttctataatcgataaaccccaatttacctcaccacctcttgcccagcctaaatacctccatcttcagcaaaccctggaaaggccgcagagtaagcacaagtatctacataaaaactttagttcaaggtgtagcccatgaggtggcaagaaataggaacgttttctacatccagaaaaatgtcgcgacaaccgttatgaaatctaagggctcaaggaggatttagcaataaattgagagcagagtgtttaattgaataaggccatgaagcatgcacacaccgcccgtcaccctcctcaaatacattctagaaactcattgtacactcccctgtgatattgtccataatatccagggagggagagaatgatttgatttttttttttgagacagagccttgctctgtcgcccgggttggagtgcagtggcctgatcttggcacactgcaagcaccgcctcccaggttcacaccattctcctgcctcagcctccctagtagctgggactacaggcgcccgccaccacgcccggctaattttttgtatttttagtagagacggggtttcaccatgttagccaggatggtctcgatctcctgacctcgtgatccgcccgcctcggcttcccaaagtgctgggattacaggtgtgagccaccgctcctggccagagagaatgattttactccccatatcgcaggggatttacattcccctgcattatttttcgtaatatccagggggaagatgaagatgttactccccatatagcatgggagaacaattccctgcgatattgttcataatatctctgggggaaagaattatatttctccttttatcgcaggaagtgtacacccccttgtgatattgtttataatatctagtgggggagaggatgatgctactccccatattgcagggggtgtacaaccccctagaatattgttcataatatccacgcggggaggagatgatgttactacccatatcgccagggtgtactgccccctgccatattgtttgtaatatccaggctgggaaaggatgatattactccctgtatcacaggggatgtacacacccctgtgatattattagtaatatccatgggggagataatactacttccaataccataaacaccctgtgtgtacaccctctgtgatattgtttgtaatatccagggtgggagaggagtatattactccctataaggcagagtgtgtatacacccctctgtgatattgttcataatatccactgggggatatgatattactcccaatatcataaacacctcacatgtacaccgtctgtgatattatttgtaatatccagtgggggagaagatgattttactttccacattgcaggggtttacacccctctgtgatacagtttgtaatatctagagggggagagggttatattactcctcatatctcaggacatgtacaccccctgtgatattgtttgtaatattgttcccaatatccttttcccccatggatataggaacagtatcccataggacgtgtacaccccctgccatattggaagtagtagtgttttctcccttgctggacattaggaacaataccatgggggggtgcacaccccctgtgatattgacagtaatataatccactatcccctaaatataggaacaatatcacaatggtgatgtacacacttggtgatattgaaagtgatatgatcctctccccacctgaatattgggaacaatatcacagaaggggtgtacaccccctgcgatattgacagtaatatcctctcccacccccggatattaggagcaatgtcacagaagggttgtacactccctgcgatattgacagtaatatcctctcctccccggatattaggaacaatatcacagaagaggtgtacacccactgtgatattgacagtaatttcctcttcccccccggatattaggaacaataccacggggggtgtacaccccctgcgatattgacagtaatatcatcctctccccgccagatattagtaacaatatcactgaaggggtctacaccccctgtgatagtgacagtaatatcctctaccccccagatattaggaacaataccacgggaggatgtacaccccctgtgacattgacagtaatataaacctctccccccaccctggatattaggaagaataccacggggggtgcacaccccctctgatattgggagtaatatcacccactatcccctaaatattaggaacaatatcacagggcggggagtacaccctctgcaatattgggagtaatgtcatttccctgcccctgcatactaggaataatatcacaagggatgtacacccccatatgctcttgggagtaacatcactctttcttcccatggatattaggaacaatatcacagaagtggtgtacatacgctgcactgtatagaataaagcaggcggaggaagatgggataaccttgctagctgaagcttctggctctctttttttcttcttcccgtgcaggacacttgcttcccttcttcctgccctcggacatgagactccaggttcttatgcctttggactctgggacttgcaccagcggcttccccgaggctctcaggccctcggcctcatactgaagactgcactgcgggctttcctggttttgaggcttttggacttggactgagccactactagcttctctctttccctacctggcagacagcctattgtgggactgccttctaaccgtgtgaaccaattctctctcgtaaactcccttatacatatacctgtatcttgttggttctgtccctctggagaaccctgactcatacattttgtttattttttctccattgccctttcctctgcttctaggcttacctagaccaccaccattctttccccctttctaaagtaaaaattgtctttttctcactaaattcatggcattctgcccgttttccatggctttcctcagccctgctctgtttattcttgctatcttaagaggaaatccctgcctcttccgtggcttttcccacttggtctacatactggtttctgttgttctcagagacacactgggacctttcacatctcactgtcacttcttggaagggctctctacctcgtctgcctgctgagcaacctcttggggagacgcgggccctcttgagtcactgaacttgagctatttggtgttggtatgttaatttatcttcttagaccacttaccacttctttaacttcaaaagagaagaataagtattattttccatggttgatatgaagagtagaaataacttatacaaaatgcattgcagttaagtgataataaatggccgtgaatgcccttattaatgttattctatcagtctcggctcagataccatctgctctgtaagctctgctctgaatcatatctgcttcttctctgggttccttgtgctctgttcttaactactttaaagcagtaattgttctgattctaattagtgatccttcccaataaaattttaaatttgtagatctcttccccccacccctgccccagcctaaccagtgttttcttacttttttgtgtacaggctacatcactggtctttcatttgtggctaaataaatgttgtgttagaagagtaaagagttcccagttacatgggatctatagttctacaaaatgaatgtatacataatccatgtaaatattccacttattttaaaacaattttttaatttttaaattaaatttaatttgtgcatgtgtgtgagaccagagtgagaccagagatggcggcggtgaggggcggtggtctcaccatgttgcccaggctggtcttgaactccccttgaagtgcccccctcctcacctggcccccctcaccttgcctcctccccctcactcctatgccagtccctgccattccctaccccctctgctgaccgcaagactcaacaagtgacttgctgagcaaaccctgctgagaagaggtctgtttagggacacaggaggccaagtacacaaaaaagcaaaagaactagcatgactttttcaatggatgtctattttacagggctggcttcagattattgttatagctttaaataaaaggaccgttttgtcatctcggcccatggcctacattatttctttactgtccattgccctgggcgcttgactaataatttaacagcaatttttttttaaaattttaaatcatgattcatcgcattgctgtaagagtaattagaggtaaattagggcttgaaactgcctgtagtgggttactttctgagatcttagcataattatcaggtgagagggtgaagttttaattagcgctaagtgggacagaaattcaatgcactgaaactacagtgtccaattcagtaggcgctagccacctgtaactattgagcacttgaaatcctggctagtcctaattgagatgtgttgtgttaaatatactggattttgtcattggagtgggaagaacagcgtagaatatctgcttgataattttttatattgattacatgttaaaattattactatgtttactatttgggacatactgagttaagtatatttaaaattaatttcaccttttaatggggcttactagtacatttaaaattacatatgtggctcacatatttattggacagcacggctctagaagtttaggaagaaataagaaaaatattgagaataggtagcaacagtaggaagtttgacctcctgtaagactgattccaataaaactaataggtgatagttttaattggctttttcctactagaaaaagtaagtgtactttacatgtctctttgttctccctctttccccttcaatttagtggttagcgtgtatttactatatcaggcttaatattcactaagcagtgttaagaagacttaggtaaatgattccctgatgaacacacttgattttcaaagcactttcctaacccatttttaattggaatagagtcaaaggtagatggcttattattagtaatctcatttaaacctcatggaattttcctgctaaatctcaaagtaaacaatttgttataggctgttttgtcaagtgcatggaagggacagcataagacatgtggtacttcatttcaaaattgcttgagatggttttcattataatcatacattatttgcttctggttttccagaaaagccagctaaacctgtggttcatttagatataaatgaaatatcctcaaaggattgctcaaagtgacttatgcaacttgaatatatatttttttctgtagggtgtttattccaaattatctggccatttgtggcaatttgcagttttttagaaaacaccaaatatttttcaagttagagatgttttaataaaaacagtcatattgaactggaagcagccaaataaaatggtcctttatttcacagttgagaatttgaaattggaaggtaattaacatatgtaaggatgatgtatttgctgcctggcttataggaatgagccaaggtgttttttgagggatgttgttgctgtgtatgtcccacctattttgcttccttaatgaacaatgcaagtttgagacagaaatatttgagaacatttttatcagttgcgacattttgatagtgaacattttatatcttctgtaaacttaaaatgtttgcatcttctgtctgcttaaaatgtttaatttgttatacccaaataatttggctataattgataatttaatttatcaaattaaattgtttttttttccctttagactttcttcagtcacatctgaataaatcacttagaagtaagctagatgtaatataatgaaatgcttaaaagggctgtgtatcttcatattacacttacagtgactttctgctgtacccattatattctacctgcagctagttgaggtaaagagagggcatttaactgtcaaggggacctgttaggagactgtagaaatctggaaaatctcttgggtctttgagggattttgggatgcagagagtggggctgggatctctggctaggttggagccagcctgcatttgtatctttatcttggaagcaaacttagaatgcagagatagatgtggcctggatgctgctaactctagccaaccactaaatcttaaggtgggagagatgcaggctttggctgggtgctaagctgctgtagctggttgaatgtagaggtcactatcttttctgaatacttgtaagtaaattaaatcattctctactcctgtatgcctgccaaccaaatgggaaatcgctatagaaaagatggcttaaattttagtctttgaagtggttaatgcacgtttctggaatcaagatttaatgtggacttggattggatattgaatatttttgatttgtctacttttctctccatagggagcttatagcttcattgcactgtgtgtgacatttgggtcctgtttggcagcaatgactgcctttctgtttagtgtctgtgtgctatgaagattgcacacaggggtccagatgcatcctgttttgagaatgttaatggatacaccagctgctgctttggatttcacccattggcggtttctataaaaactttagacacagtgagccactcttctcacggaatggtggaaaccctcccaattccaatttcctaaacaccagccaagggccagccttgcatgcaggcctttctaaggatggcagtctcttgcctgttatatgaaatcttttctgcacactttgtataaccccaacttaatttttggtgttgttttaaaatttcattttaataacataatattataagataaggtaacttggtactaatttctgttgtatgatccatcttaagttgcagcgctggttacttttttgactttcagtgacgaacagctatttgtacataagttaccatagcaatttaggtaattataatctgtcctatttatctcatttacctttcagtaaaattgttaaataagcaaaataatttctgagttaaaattagaataaaaattgtcttttatttggattacatgaataatctagttttcatattgtgctaaagccctgcttagaattatgaaataagataaaatattcaatcatttttatcaatattttcttacctaagcatgcaattaaatttatttattttatatacttcaatttgagaaataatgaccacatgttgttactttggtcttcaatgatctctaatttttagggtcgccatgtcttgcttaaatatatcatagtaacaggttcagtgaatatctttatttttaattttatttacttatttttttttgagacagagttttgctcttgttgaccaggctgcagtgcaatgacacaatcttggatcattgcaacctccacctcccaggttcaaatgattctcctgcctcagcctcccaggtacctggaactacaggcatgcaccatcatgcccggctaattttttatattcagtagagatgaggttttaccatgttagtcagactggtctcgaactcctgacctcaggtgatccacccacctcagcctctcaaagtgctgggattacagacttgagccactgcccccagccatcttttttatttatttattttaattgttgttctggaaatcctgggatgcatagacagtgaatatcttttttgttttttgagacagaatctcactctgtctcccaggctgcagtgcagtggtgctatcttggttaactgcaacctctgctttctaggctcaagcgattctcctgcctcagcctcccgggtagctgaaattacaggtgccagctaccatgcccagctaatttttgtatttttattagagatgaggttttgccatgttggccaggctggtcttgaactcctgacctcaggtgatccacccacctttgcctcccaaagtgctgagattacaggcatgagccactgagcccagctgaatatttttttttaaatcaataaccttatttcttagagtagttttaggttcacagcaaaattgagaggaaggtacagagatttctcatatatcccatgcctcccacacacgcatagcctcccccattattagtattttccaccagagagtggtccatttgttacaactgatgaacttacattgacacattataatcacttgaagttcatagtttacatcaggcctcactcttgatgctgtacattctgtgaatttggacaaatatataatgacatgacatgtatctattactgtaatattatcgacagaacagtttcactgccctaaaaattctctgtgctatgcctgttcatctctccctttctccctagcaactcgtgacaaccattgatgtttactctgtcttcatagttttacttttttcagaagagtcatatagttggaataagaagagtggatatctttttgagtagttaaaaaattaaagctccatggcagttgaatgtagtcatttaagatgttctttgtccttttgtttttcttttgcttctttatcattgtaaagaatgatgtattctgatgagatatgatttacatacttagaaaacatgatttgtatagatatgtggcacataatagaaagggttgaggaaaaggacaccacgccgtactacacagcacaacctggagcatcttgctctgtgaggtgggtccagatagactctttagcaatggaagaggacaagtgcaaagtgttgtgctttataaaactggaatcacaaagtctttcatacttaccttcggttggaaataagaccaggcagtgaatgctattaggtaaatacataagttcctcactgatcctcttcctttgagggatgaggttgacaacagcctgtattatgatggcatgactcacctacaactagattctgtcatgagagatgacaagggagttttgctttatgcgaggtgaaaaaatttttttctcctactagggagatgggcaaacattagaacattctggtagtaaaagggcattgatagtttcctttctatatattttttcacatcagataatattgcccggcagcctgccatacctccccagtgtttattcagcttctctctgaatgtggataagctcttaaaggagtgatctttccagtggttctttctgtgggaggtaaaatggcaggtgaatttggggcttgttatacgtaggccagagcaaatagctacaactaaggaaaccacccagcaccttacccagaagagtattagccagagtaacacactgatctctcttgagatcttctccactggtggctggaaagtatttgcaaggattcctgtttctggtctgattcctatgttttgttggtttctggcgatagcatgttttattctaaactaaacagtttgatctgaagagctagagaggctgtgtggtgttataacaaaataagtgcagtaactacaccttaactgtgggagatacatttcaagacccccagtgcatgcatgaaaccatgaatattactgaatcacaagctgtttttccctatacatacatatctatgacaaagtttaatttataaattaaattaaatctgatgttatctgtagatagggtgtgagaattgaattgtgtcatcagcaggaatgattgcttgtttgttggtggggaaaaactctccacacatttggttacagaagccttctttgttgatgattgttgctgtggtgtgacagcagagaaaaacgtgtcaagtatgtctttctgcgcatatagtggataaggggtactagtgtatactctgttgtaatggcccctcatattttggtccagaaatcatgctctttgacactgttgactcatcacacctgttctgctaacaataccatttttactcaatctcataggctttggctaggatgacttgtatacttcagttcacttgtagataccaaattttaataaatttattcttctttgcatctaataaatacagagggaagagttcttactgcattaattacctaccaatacttataatgaatgttaattctaataagttcccaggcatgctcccaaaggaatgctttgtaacaaaacgtcagtcttatgctttaaaaaaccaaaccaaaccaaaacaacaacaacaacaaaaaacaggatctaaagcatacacacaagtgtgcacaatttttttatgaaggtagagtcttactatgtttcccaagctggtctcaaacttctgggctcctcaagtgatcctcctgcctcatcctcccaagtagtttggattagaggcatgcatcactgtgcattcttatgattttaatattctgtacatttattattgatttaaaatgcattttacctttttctttaatagatgttggaatttctgatgaatctgcagtcaggtaagatttcatagatttaaaaaattatgttaactaagaaaatatagatggaagaaactaatatctgttgagtgttgtattctgggctagacatcctaatatgttctatgcatttatcatctcataaagccatcataacatctgtgttcctataacctactgttaaataaacaactatggattagagctgattaattgcctcatgatcccatagttaacaaagtagctggcctacagtttgaccatcagcctgcctgccttccaaatcctttctcttgctcctcagcatagattgatagatatctgtgcagcccttggatcatagtataggtctgaatcagatcaatcagattcattaatttgattaacttctaaattaatgagagtttaaataccttgaactctcatttaagtttattgttagaatgtggttagtcctaataaatttgacgatttcagtgtaaccagtatcttatttttaccttcaaaggctctagggcagatctgacttagctttggccataggactgtaagttttaccaaagcaagtttaggcaagtcttagagacaaattatttgacttcacagtttggctttccatttaggcaagtatttctgcttacttccataatacattttttagtcctgttgctttttccatgacttttatataatcttgtcctcattttttaaaactttcttctctgtttttcttggtgtttcttttgttctattattttttcaaactctgctgcctatgtattccaagtttttctatagacagaatcaagaggacatagaattacagaattttaaggaatcttggaatgaattaaaataccttctagtatttttctctgcgttgaacattctggtcaagtgattctctagatagagaatgtgaggctcaaagagattacgaagcttttttttagacataggaattggcagaaatgagatttgaactcatggtaaagcccagtactcttgcttctttctatgtcctattagcgtgtgttttaataatacaaacgggagtgagtctgtggatagaatgagaatggaattagctggtgaacccaatggaagtagataagaatggaatgagcaggggaagtccaagtttgaagataaacaacactggattggataggagtacggactcttctacaagagatcaaagtattggggtttatgacaagtttgataaagataaattataaaaatgaaggacacaagatgttgggaattatctacaaaggcacattaaaatagaaggttcaagggagctctaaaaattttgctgcttttttttttttaaatcaaggactgacaaacttgaagatttttactgaaagatgccaaaacattttgagacactgggaagaatgtctacagcagatagaaatgtggtgtcatctacttccatcctgacttacaaaggggtggcttagagcccctggagtactaaggggatggaaattgctgaactacatagatgtgtggcacagggcaggtgtctcctcacctctgcctcttttcacagttcactgatgtccttcccatgtccatgtgggctgggtcaggggcatgattagctggaaaatcagtcatggagttcagttgggtagttggtagtgtgtatagctggtggcaggtgatggagactccagttagcttgtttttcaggagcagggatatagagagctcctactcctggtcatttgaggccattctttcaggaatctgtgctttcatacactgaagatttaaagattggagacttctgtggaaccctgcagaagtagaatctggaagtgggtgtccataggaagaaatatacttagatagtacttagggaaatagaggtacaactatcatgactctgtttcttttctggcagtctctctccttgggtgtctgagtgcctatgaaaatttttaagggattgctagtttatgtggacctgaataaggtaggacctatagagtgaaaataatgggattttataattgtgaatattttaatctttctgggaaaagtattctcaataagaacatacatctttgctatttgacttctgtacatttagctttcatacatttcaaatattgtgggggttttcctgtaccaatttagggtaaaggaaagcaataggaccttcctaagttggatccatgctgaggaatcaagactaccattttgaagtgatgtagattagtcttttatccagagacagatcatggaaaagagacagtggatctttctaccttgttttaggtcatcagttttattccagtttagggaacaaaatttatgtcatccattaattgaattttaagttcagcttcaggacagataatttgtgagggcacattattgtcaggctctgccaatatattgactgtcactatttgttataaacctcaaggttagttttcattgaatattttatagatttagacaggtggaggcagaaataggtaactaaaatctctttttagaacagaggacatattttaattatatcaagaatcgtaatttaatatatagatcactgacttttccccagattatgttttcctttttttgagggggaagctggatataaactggcagttaaaaaaattgtaaagaaatcaacttgctcattttcattgtgtatttttgctctcaagcattttgcatgaactgtgtgtggattcattgcctacattggatgatgaagacttgagtgttgctactaaggtaaagtggtctcttgtaaaattaatcttctcactctgggtgtagttttgcatagtatttacttttcaaatttagcagtggtttacctatcattgttttatggtggtaatggaaagctggtcagagaaaaacatacacatggctagttgattcaaaaaatgtgtttaactttggtaactaataaagattggtaagtactgtgacagggtgggagctgaaaaataaatgaactggaaaataagtagtcacaggaaaatcacattaggaaatgctttctccaatagaagaaatatgaactttggttaaagtttatttggataaatactaatactttgacttttaaatcatacgagtgtgactttcttaatatttattcctgtataaaccttcagtggatcaaattgtttgcagtaatcatggaatcctcctggtaatttttagtggcagaaatgttcagcacatagcatatagcttttgttcttggaaacttatcattttggtgtcatatagtttttaggagagattgtttctctacttatattattggttctgtagtgagactaaaaaagtattaaaagttgtagaaaaatagctgagtttggtggtgtacacctgtagtccctgctacttgggagtttgagacagtaagattgcttgaacacaggagtttgagaacagcctgggtaacattgtatctgatttaaaaatataaattgtggaaatgtagaaatttaaatttatgttctcaagatttgtattgcaaagggatttttatgtgatttatgagttgtccatgaagagtttatataaaacacttcatctaattgaataacatgtattttcctgcaaataaccagttctagaagcagagactcttaataccaatatggtaagtctttatcatcataattttgtcattgtagtttatttaaaatatttacttggccaggcgtggtggctcacacctgtaatcccagcacttttggaggccgaggtgggtagctcacctgaggtcaggagttcaagatcagcctggccagcatggtgaaaccctgtctcttaaaaaaaaaaaaaaaagcacaaaaattatccaagcatgatagtgcatgcctgtaatcccagttgctcaggaggctaaggcaggagaatcgcttgaacccaggaggcaaagattgcagtgagccaagatcgcaccattgcactgtaggctgggtgacagagcaagactacatcttaaaaaataaaataaaataaaataaccactcaaagtccttatatcatattctgaaagtttgaatgtcagaaggttttctatttagttttttaaatgatcattggaagctcctgcataccataagctactggaggtcagtaaacatatttgtgtgtatcctggagtacctagaatacagtcttccatgtaagaagcattttacttgttgttttttgagatggggtttcactctgtcacccaggctggagggcactggtgagatcttggctcactctgatctccatttcctaggctcaggtgatcctcacacctcagccatccaagtagttgaaacaatagagctatgtcaccatagacctgtgtcaccatgctgggctgagttttgtagagatagggttttgccttgttgcccaggctcttctttaattgttgggctcaaatgttctgctcgcctcagcctctcaaagtgctggggttacagacatgagacattcagccttaatagttgtttaatctgaataaataaacaaatgaatttttatataatggaatgttataagtaatataataaacctaatgtatctaatcattaaatattgtatttaaaatattgcttacattgtattattttttaatatttaacggtgtataagttttgacatgttatgttgagaatttatgccataattaaaaaggaaataaaatagaaataggtcatcggtagcaaagagggttacaatatattttctagtatcattcaactggaatcttaacattgagattttagattaatatttcttaagctttttattagacccaactcatgttccattaaatacaccatttcaagccatacattactctttattattattattatactttaagttctagggtacatgtgcacaacgtgcaggtttgttaaatatgtatacatgtgccatgttggtgtgctgcacccattaactcgtcatttatactaggtatatctcttaatgctattcctcccctctccccccaccccatgacaggccatggtgtgtgatgttccccatcctgtgtccaagtgttctcatttttcagttcccacctatgagtgagaacatgtggtgtttggttttctgtccttggaacagtttgctcagaatgatggtttccagcttcatccatgtccctacaaaggacatgaactcatcattttttatgctgcatagtattccatggtgtgtaagtgccacattttcttaatccagtctatcattgatgggcatatgggttggttccaagtctttgctattatgaatagtgctgcaataaacatacatgtgcatgtgtctttatagcagcatgatttataatcctttgcatatatatccagtaatgggatggctggatcaaacagtatttctaattcttgatccttgaggaatctccacactgtcttccacaatggttgaactagtttacagtcccaccaacagtgtaaaagtattcctatttctccacatcctctccagcacctgttgtttcctgactttttaatgattgccattctaactggtgtgaaatgatatctcatagtggtttcgatttgcatttctctgatggccagtgatgatgagcattttttcatgtgtctgccatacattactctttagaattctggtgaccaattctttttctgggtggaaagttgatggaaagttccagttttctctctctgttataataatgttctttcaggtaatggtagatgaccatatttagctaattgaatgtcttatagtaagaaacactatcacagaagtacttacaaaaaactaattgcagcataaatattaattagtattatcagagttatgaaagaccgaaggctctgttatagatctatttccccatgtactttattgtacttcatgtttttcgttttctttcttggcttaagctcatatttcattgactaattaggcttgttttttgtttgtatctctcttttaaattgaaatttttggggaggcagggtcttgctctgttgtccatgctgtagtgtagtggcatgatcttggctcactgctgtatccacttctcaggctcaagtgatcctcccacatcagcttcccaagcagctgggactacaggcacacaccttcatgcctgactccttttggtattttttgtgtagagatgtgttctcattatgttgcccaggctggtctccaactcctgaactcaagcaatccacccaccttggccttgcaaagggctgagattacaggtgtgagccaccatgcctgggcaacattgagattgatttaaagaaattgattagggctgggtgtggtggtgcacactgcttatctcaacattttgggaggcagaagtggaagatttgcttgagcccaggagcttgagaccagcctgggaggtataatgaggccttgtctctacaaagataacaataaaaacattagcatgacatgatggtatgcacctgtagttccagctattcaggaagttgaggtgggaagattgcttgaggtcaggagtttgagaccacagtgagccataatcaggcccctgcattctagccctgggttgacagagtgagacccagtttcataaaaagagattgataagaaactcttgatgcaactcattataattttaaatggaaactaattcttgatattaccttagcagtgtgtccccgagaaagtgtcagagcctttacgtggaccttctcatgaaaaaggaaacagaatagtcaatggaaaaggaaaaggtgagaaccgtattttatttaaaaagtcatttgatggagaccaggcgcggtggctcacgcctgtaattccagcactttgggagccctaggtgggcgggtaatgaggtcaggagatcaagaccatcctggctaacatggtgaaaccccatctctactaaaaacacgaaaaattagccgggcatggtggcgggtgcctgtagtctcagcaactcaggaggctgaggcaggaggatggtgtgaacctgggaggtggagcttgcagtgagcggagatcgtgccactgcactccagcctgggtgacagagtgagactccatctcaaaaaaaaaaggcattgatggaatgtttcttttaaaatatgagcactaatagagtttaatagctaaagaaaatgtcctattaactgtatcataagtaaaagataaatgaaatggtgataagtggtgtctctaaccaagggtcagcagttgattctattggaagtaccactaaaggaggtgagttatgagttccattttaacatactctaagacctgaggcaagtcaggagagagggaagaggaaatgaataaaagagaaagaaagaatgaggagggcagagtgtacatggaataaataaaaaaaagtggatgtatgtaatggagggtagtaaagtcaaattgatctgtagaagaaggaagaacagggtgttagaaataggaaggaagataaagtgagcttccagtaccaaaatgtgtcatataattacagtaacattttccttctcttgctgtcattctcgctactggggaggcattaaggattgaggtactttaccatgcagacctgtgttttatctaccatagatgaacatcaccataaatggtcagccatgtatgactgtaatttgttttcatagaaaatgttgtaacttcataggatagtatcatattaacataattgaaaagaatagtgttgggtgatttattgggaagaaattaattagagaagctttgcctgattaaaagttcattagaaacattatggcttataacgtagtattaaattcagggacataataggaaagaagttgaggctaggccaaaaaggccaattagggtaaaccaatatggaagcacaccagtgtagaacaaggcattcaaattgtcatgaatacgttgaggagcttctggaaagtgcacattctgactcagcaggtattggagtctgcatttctcatgagcactcaggtgatgtttgtgctggtccttggacacagctctgagtagcaagggaatagccttcctttagagaaatctggaaaaagaaccactggagagcaatttaaaagataacagaatccagggaaagctttaatttccttttatttctgagcatgattctagccacaggggaaggaaaatgagatgaaaaaagagagattacaggtgtatactactgctgaatacagatgaaaaaagtggtcacaatcatccataaaaagcagttaggaagggaagcatcaggatgacagttctgataatcattttttcaaaggaagagggatggtgaaaggacacaaaaggaggaaagaaagacatttgctggggtcttgggagttaaagccaagttaacttgagacaactcacttccagttgcttcagcatatgcccagtctcacaaaagaggttattgctgtggagagtactggagacaggagggagtgctagagttggggtaaaccacagcagctcatttcacttgataactgtcaggcctcagggagagaagtttcactgacatgagtgaataagatatgattaagttgcatatagatgctttggtgaaatttttttgagacagccagttcttcgatatgatagctgttttataaaagtcctttacagtgtaagataatataccaaactcagttaattttagaagtaatcataaaattcattccatgaaaaccaaaattatcattttcaataaatactgcactgattttgaaatataaatatgtattaatatccagcaagtctgtggtcattcaatgttttcttttttgataaatattttcatatcagaagcttattcgacatggtttatttgatgtgttttatggaccaccttgcatgagtggatcaaggagctctaattcaaggccaaatgaggggataggagaaatgtaggtgctgcagtagcccatgtgatcatgggaaaaatgagtagtttgattagctgttatttcataagtgtgtatcctagctgatcaatgtagaaccctttctttgatgagaggtgaatcacacattcacctgaactgtcatcccaactgcgtatttcctcagtgacaagacaaggggaatttatttgtgctgtgctggcagcaatgcctctggtgtgtggagttaaaatactctgtacattcaccatcagctttgacattgattctctcaggtttgatttgcccctctgtttaatggtcccttttctcctcatcagtccacatgttcacggttatatcaatgcttttctattttaagtataggcatttgaaacataatctcactactgaaatataaactgtgcattttgggaatcctatattcctattttcctcattgtgtttctgtcatgttgctgtcctaggcaatgaaaagaagaagccaagaagaaccctcaaaaccttaagtaattatttttatagccagacctgagaattcagctcgacagtaacactgcatgaatgtttggttggccttgtcatacttacatataattgatgacatatcccctttgctttgtagggcctcctgcaaaacatccttccttgaaggtaattaattatgtatatttttgaatcactaactccatgttgtataaaatatatatgatttatgaatcgttatcttttaaaacccattcagcctagcactgaagtggaagatcctgctgtgaaaggagcagtacaaagaaagaatgtacagacattgagagcaggtacatttaatggaatactggaaataaagtacattcaatgattggatgtactcatattattcttattcctaattctatttgttcaatattgaacagaaggcattgacataaatgttattgttggtatccatatttgaataaaaacaaatttagaagcataaaaaagattttaaaaatgtaagctttaagtcagatgtttctgtttaaatgttttgaatagcatgaagttttcagtataaaatttttatacttgtcagggattcaaagcagtgaattttgagactcttaagatatttccagtgagttaagtgctagttggagttctgatctttacctagaggaaagctttacttattaaagtgtcagtttctgttttaacttcagaggcttgctgctagtgttattacactgatgatctgaagcctatcagatgttctaatgagcaagactgtgtgtgtaggtgtatatatagatgtgtgtatgcgtgcgcttgtggcatctttgactattacaaatgacgaaagtaatgattcatttatgactggtagacacagtcttttaaaatggtgattttgagcctttttggtgttaaagtttttaaaacatgattgcatagaggctaccaacatcataagttggttgtttttcatttcaatgcccttttgaaatctttaattacattgtgatgctcagaaataatatgcagaattttttgtgtcctaaaatggtatgtgagtggttatacactttatatacctttctgccactttctttggtgtgttttgtattatattttccacttgtacccacattggtgtgattatccctggtttaattcattttacactgttcattgtattccctcataccactttaccacatttagttagactctcctgttgctgataaatgaagaaataaaaagaaaaataatgtcagattaagagggcttttctttaattggtttgtatctattagcgtttactatatgagagtttaaacctgaaaagttcagaatacaagcatacaccaccatattttattaatacccttagaactatgactcatgagcctttagcctatgaagttagcacaattcatttctctgaagaagaatgctgggctgttctcagaaaagaaaactgaaaatagcaaatgatattgtcttattttacctcttggacatccttgaatgaaactgctactaaagggatactcggatcaaaattcagatctaatgttttgaacagtatagtttgtgaatgtccagtgatcatgagcccttgatggggaaatgacccttcgagtttcacttttgcattctcttttcgttgacttgtcttgaaagcttaaattcaactattttatttttacagaaaccaggaatataacttttaaaatatatgtctgtcctgtctcacggtgttgtgtactcttcagatcttgtatgaacatagacttatatgggaaaaattaggttgtttgtttatttgtgtttttgagacagagtcttgctctgtcaccaaggctggagtgcagtggctcagtcttggctcattaccacctctgcctctcgggttcaagcaattctcctgcctcagcccctcgagtagctgatactacttgcacgtgctaccataccctgctaatttttctatttttagtagagatggggtttcaccaggttggccaggctgctcttgaactcctgacctcaggtgatctgcccacctcagcttgccaatgtgctgggattacaggtgggagtcattgtgccagctacaaataagatttttaaggctattatactttatacaattctttggtctatgtgaattctgaaggtattcatgcattgagggaagattatctcagtttaatgaaagcattttttaatttaacgtatattcattaaaattttttttgaagtttttgtctctagtacacagaaacacacaataatgtcatgggtatttgaccttaatgtgtttatgcacaaacttagttattgaaatattttcttatacctgaagaatcttaattactaataaacaaatttctcatggaaaacaacatatataacagagatggttgagtgattgaaagtaaactgtagtaaataccagaagcttagaacaagttaagtaaacttttctgagttaatagcaattacaagacttttaaaatacattagaccacgggggagtagtgcatttgtggggtagaggacaacatggtactgcttcagtgaagaaagaacttttacaccttattacaatttgtattattatttacattctaataaataaaaactttattttcagatattttacatcatgtttctactagttgaaccatcaatagtaagacttttcaaagatttgggaagttgtgagttgatgataaatatctgtatcaccatcagtgataaaaatcagacagcaactaccacagattttggacacgcgaacttcatagttaaagaaaggattaatcttggagctgtgtttctatcaaggaattacactcttctttacctgtgtgaatcgcagttattagagtagaaagagagcaaagaagggaaagaagcatagaaaattttattctagattacctcgtttggcttcatgctaccatagttctgacttttaaaaagtcattttgtggtcaaatgtactttgtgtttactccccttatgcagcctacaaccaaacagaatggttcttagcaaggcatttgtattcttcccttaaggaaagcaacatataaataacaaagagaatgggaagaaagagtgatttcattgaggttggtatttaacataaatttgagtgcaggtaccatgattatatttagaattttgtggctggatgggaaaaccagctagatgtctatagatttcctactcaaacacaatgtgcctttgttttacttttacgtctctaatttagcaattattaggtacaactgtatgcagtgccactaaaaatacctcccaaaaccaaatattaaataatgtctatggctttctgttttatagtgttgatttttgcaatattaatgggaaccacttagcatttgccttgtggtgtctcctcagctgtattcacatattccatcaccttttcttaatggataatcatgcactatgagtaagggttttcagaaaagctgtgccttttaaagataacacaggagcatcaaatttaattctgctaggacgcctggtctactgattaactgcagctaatatgaggtctacttcacatccaagttaaattcagtgcccttaatcagtcatatgatgaggtcaacagtaataaattatgcaatattttttcacccacccctatagttttaatttctttttccccttgtgtctgtgtttaacattttgctttgcaaaacatgatgataatcttctaaagtagtgaggacaagctataaatccaaagtttcttacctatgcaaatgacttgtttgctctattttctcatgagcttggtagatccaggaaacataacttttaaaacaaaatccccatatattgctgggtgtggtggctagtgcctgtaatccagcactttgggagtctgagacgggcagataacctgaggttgggagtttgagaccagcctgaccaacatggagaaacccatctctactaaaaacacaaaattagctgttcatggtggcacatgcctgtaattccagctactagggaggctgaggcaggagaatcacttgaacccaggaggcagaggttgccatgagctgagatcacaccactgcacttcagactgggcaggaagagtgaaattccatctcaaaaaacaaaaacaaccacaaccacaacaaccaccacaaaacccaaatgcatttccttggcacagtaaaactgaaaagaaaaagggtaaagtaaatacaagtaactgaaagagtttatgtatattattttacttctcatttgataaaatttgtaaagtaatgagcagagtgtatttcttcagggacccagatatatacatttatttattcaatagaaattcattcttataatggccactgatacctatatcctaaatatttctgaaaacatctcctcaggcctgcatcacctttgcaacattgccttatattttatctttgttcattgatttatatgcctcagaattttatgctcctcacagtatttagagtgaattatccttaatgcaaatagatccgtgaaccactcctgaatacctaatgtccaagcatcttaaaggtttatataaggatttcagaaactgacttctgggttgggcaaggtggctcatgtctgtgatcccagcactttgggaggctgaagcaagtggatcatttgaggtcaggagttcaagaccagcctggccaacaaggtgaaaccccatctctaataaaatacaaaaattagcaggtggtagtggcacgcgcctgtaatctcagctactcaggaggctgatgcaggagaattacttgaacctgggaggccgggttgcagtgagctgagatcatgccactgccctccagtctgggagacagagtataaccttgtcccaaaaaagaaaaggaaaggaaactgatttctgcccaaatctccatctgtatccctttccccatctgtctttttctctggaattactgagctgctggtaatggcccctcaccattcctcttctgcagagaaatacatactctcttggaggcttctcttcctctcttgttgccgcctggcatgtgctcaccctttcctgccctctgcctcgcttaatctggctaacctcactctctaagtctcagctcatgggtgatctttaggaaagccatccctgacagcttctattttccttccttattccccagtgcctaacacttagcaggaactcaataagtaattatttagcaaaattaagactgtttatacaaagatgattcaaaagattgtcctctacagtctagcagcaaagggggtcaacatgtaaagacatgatgtgcaggtcaggtggtaaagtgacactagaaaaattgacaaggtactaagggaccccaacgaagcagacacctgtgtgtgtggagaaagatagctagaatcaaggaagatttcacatagcattctgagcctttttttcttcctctttttggagacaagttcttactctatcacccaggattggagtgcaatggcatgattgagactcactgaaacctcagacttctgggctcgagggatcttctcatctaagcttcttgagtagcggggacaacaggaacatatcaccatacctgtctaattttttgtagagtcaaggttacctatggttcccaggctggtcttaaacttttggccttgagcaattctcccattttggccttccaaagtgctgggattacagatgtgagctattatgcccagcctactttctgagtcttaaaagatgaaaataaatttttcagaatagcaggggaaaacatttgtgatataaaaaatggggtgcacactaattgaggtataaacaacaataattttgcaagttattagtaactgctaactcaattagtgtcttgttaaaaagatactgttatgaagtatagtaaagcattacattgtatattttgactgtatttcaaatttctgttttgtttccaacagttttgttgacttacgttgggtggaacaatttgtgagtgtccctgagattttgcatggcttgaatctggtgatatctggtgtctccccaagtggtttgttgaagttttggataattagaagtatttcttacagaagtaaatatttcagtaaacattgtttcattcaaactctcaaaatataaaatacaaagaaatgttattctctatttatttttataaagattatagtctttatctaactcttcttagttcatttgaactaaatcaatgaatttgtcaacagaacaaaccttaccagtggctttagaggaagagcaagaaaggtgtgaaagaagtgaaaagaagcaatcacaggtatatgaaaatttaagttcttgtttaatattaggttttttttgctttactaacaaagcatagtccaaatgacatgacctttcagactatacctttagaatccaatagatcataattttatatttaatttttaaaacatcttaaccagttatgaaacttaagatattcttactatctctagtaactattagttattctagtaattcttagtatctctagtaactcatagttgtctttacccttggaattgaggcaagaaattttcagaattatcttgctgttttatttatgtaaccttactcataatacacaaggtaacatgaagtattgggtcatattactgaggaatagaaattatgaacagtttaacaacaatggccactgagttaaactagtgttaaaggagtcatcattgccagtgtttcaaatgttgcagttttatattgctggtcaccagtgccgaggttaaagatttattctgttttgtggtcaccagctgacttctgtgtctgtgttcagggagtgaatggggtcataaaagtcaatgcagttgcctattaatagaatcctaccttgcagaatgggacctttggtgtcagggtgtgaacaataactttatttcaacataaatacatagtaaacattactaaaatttaaaaaatccaaaccctatcactaccggaacttaaaatatattagaagtggatataagcagaaattctatctagatacataacactatcatagtatatcatttgaattagaatttaaaattttgcttctctttcttattggtgttcagtttagctcttaataatttagtgtttgcctagtgctctagttcatcttcagaaataaacatgcactgtaggggctcactctttctggtatgctgaggtaaagtctttgtaagagaggaagcttttataatactacctatcatctttgaattcatttctggtagattttacacaaatgcattaagtttagtccaaacagacactgagagttcagcttgctggttcatgtttctgtcctatgttaagccaaggcaaattatttttcactttttagatacaatcccataatttaagagtagcaacacatagattaagtttcacagttaaattttaattattttctaatatttctttgtttatacttgattaaagctaattttaaaacatgcactctgacagaaaagacatctgagaaacaaaacaagcaaatttgttttccattttgcacctgacccccccccaaaaaagtctcaagaaccagaactgggtaagaactgtgataaagggaatctatctatatattcatgactttctttaaaattcattacaaacaagttcaagctgaatattggtaaaagttctgaaaactccaaaattactgcttgccctgaggaagagctcctacatggtaactctaaagagggatgaacaaaaaaggagtgccctctagtgtgatgaatcatgtccctgattgtgaggagaaaaatgtatctggagggtctagctctgtggcagtccaggcagcgcctgaacagaggaagcccatgtcaaatgtctttttattccattcacactccaggtccctgaaatacacttaccagtcatcttctaagcttcatttaaattaaaataaatcagactataaaaatgataacaaaccagacacacagcttgtttctaacacagatgatgaaaatttttgttatgatatagaaactgaaaaagtaaagaacccagtaattatgattgaaatgaaagatgattaagagtttgacatgcaaatggaaaaatgtataaacccaaataccactaattggaaattagacattaggcattggtctcagtctagagatccagaaagtctttttgatttgtggtttacccaccccaaagaaatgaagcatatgattcagatagaaagccacagtatttctgctgctacagatacttataaaaacagaaaaccaacacaatgcttattccagaagccactgaatgacaatcccagtgttaataactacaaaaccatgaatcttgaattataaaatctgggttattctttgccacatagtgagagaacatcaaaaaatatagctagaaacttacagcaagatatttcaaggtcactaacatagcacatgtgtacatacgtaacaaacctgcacattgtgcacatgtaccagaacttaaagtataataatagtaaaaagaatgaggtaggcatgttacaagtagagttcctggctttggagaaagagaaagtccaacttcaaaaagacagaggttcacttgctgcttcttttttctctttatcaattatttgatttagtcaaattttctattcaagaaaatcccatgtgtacagttacagcggggttttctaaatgtgtaattatgtgtcaaagtagactagtcctgctatctaaacaatggttcggagaatgttctcataatgtttgttcattaatcaacctaagtctcactctcagtcttccaagtggcatatgagctgggaaactaattcagccatataccatgtgaccttctgaaccagatcaacataaagaaattgctaaagaaataagctttagattctagattctttttactatagtcatttagagatgaattacatttatttaatgatagaatgggaatacaatgggagggaagcaatgactgagatgagccacaaaaacacgtctcgccttgagagttgcaatgaatattcccagacaaatgagtctgtttaatgtgttttcatgcatgcaagtttatctgcttagctcaaactgtttgaatttatagttccatcatggttatttccaatattttgaaaacaaatatatacttccacatatttaaaaaaatcaccactccaatatttctgttgaatcagaccttacattatgttgtttaataaagtatggtaagttttggcatgtatgatttttatcatgtaagaagaataatttcttagctaaaaatttaacctttgactctttagtagaaagttgagttctgtacactgtgttctaaagatagacaaaaatctagagattttcttctttcaaagtaaaagcagatgaggcctttttccaccctctgaggtgttaaattgctttgctcgttagacttttaatatatctgactaatttgataaatttatctggtaatttatgtaattcagcaacatggaattgtataatgttatttggtgccatgaaatgctagggaatgccgcctcaagagctctggatgaaacatttcgtatgtcttggttggtttgactcccattttcagtagataatatggcttaagtagataactgtaccatatgtgttccacctataaacatttgtggtaactgaatgtgaaatctgggaagcatctcgttttccagaattctgcactaggaactcagcagtttcattctgcttcttgtgttgtggcaaacaaacattggttcccatagttcagggagaactttcacttttttgatatcccaggattcaaaaaaaaaaaaaagagataaaaggcagtggggaaaagaatagctcagtgcagaaaagggaaaacttctttactgttcttgaaggcctacaaggttacatcctcttaatctggctatttcatgtaaaatccatgtggcaatgacagaagatatatgttatgcctgtgtctttttatttctctgtttctgccagtcaactagcataaacatttatatcagatagcaaagagtggatgcgaataaaagcacaaaatggagaagagtcctttttgaaattttggaaaattcttccattcactcaaacagaaatgagcagacttgacaaaaatttcaatgataaaatgatgagtatcttataattattatgtataatgataaaattaaagtaagcacaaaatacttttatcattaaaatggtgatagttaacctgaatcaagttaaaaaatcagggaaaaagtttttttattgaataaaataataattattattcatattacttttattaaaggtcaaagaaggaaataatacaaacaaaagtgaaaaaatacaactatcagaaaatgtatgtcatagtacatcttctgctgctgctgacagattaaccaaagaaagaaagattgggaaaacgtatcctcagcaatttcccaagaaactgaaggaagagcatgataggtaagtaagcctatagcagttttttttttttttttttttgagatggagttcctctcttgttgcccaagctggaatgcaatggtgtgttctcacctcactgcaacctatgcatactgggttcaagtgattctcttgactcagcctccctagtagctgagattacagacatgtgccaccatgcctagctaatttcttgtatttttagtagaaatgaggtttcaccatgttatccaggcttgtctcgaacttctgacctcaggtgttctgcccacctcggcctcccaaagtgctgggtttacaggagtgagccaccgtgcctggccacctatagcagtatttctcagcagataattgtcattgtgctataaactaattcaaaattggactaatgttcattatgattaacaagttttatagttttaccagggatatttagccctgcctagtaatcagaaaaatgcaaattaacataaaataagatatattttgtaaagtcatgctgatattgaaaaagtaattcctaccattgaaaatgagaggaaaaaggcattctcatacaatgttggtatatgaaattggtaaattatttctgaagggtaacttagtgctgtttatcaaaatttcaaataacctgacatccctttaactcaacaactccacttctgggactagatttcacaggaaaacataacttgtgtaaacatacacacacttattaagggcattaattatatattacacataatgaacaatagcttaataaatatataaaatatatgtaataagaaggtgaactggaagtattaagaaagaattagaaaaagtgtggggtaacagatgttagactctttagcctagttttagatgacaataatctgcagatatagtttgtgtgagagatatcttactctgtaaatcatttggagagacacctgcaatatttcatagagatgaaaatttatttctagtgaacttatacgcttgtcaataaatagtaactttaaaaatttagttgattgtaaatgaccttttctaatcaggtaataattatgactgtgtgatttgaaaaggtaattttgaacttctaactatactgaattatttccagtatctttttgtataatacatactagagtgactagtaataaaaactttagcagaatattctttccttactaattttcaagtatatgcattcgtttgaagatgttgaagtgagaaattaaatatctgagaactacaaaggaaaaataatccagaacatagaaattttactaggatgataaagagcatctgcagaggtagatcacaggatgatctctttattttttaacaaaatgaattttaagataaatgtctttgtctgcagatgcatcttaagacaagaaagtgaagaaaaaacaaatgttaatatgctgtacaaaaaaatagagaagaattagaaaggaaagggaaacaatataagaaagaagttgaagcaaaacaacttgaaccaactattcaatcactagagatgaaaccgaagactacaagaaatactccaaatcagataaataaatctttggtaaaaattctatattttaaactttattttatcaatgttacttataatatcctcttgatttaatatataatattttggtctaaaacaaaccagaaatgttatctcatttttaaaaaatgaatgatgacacttacaggtacaattatttttattataaatcttggcatccacataggatattattttattacaaagagcttttgaaaacaataatatgccataatatatacttagtgataacctattgataaagattttgttcccagtaaaattgttccttgtacttcccgccatttcatattgattactgtacctaatactataaagaggaaacaaattattgcaatcacaaataatctcatgatattctaagaagagctctataaattttatcttatttaccattggtgttttgaaataaatgttttctttcgtattgatacatttacaccacagaagtaactgtgatctgtcagagaactagaagtagagtaagaagtcctggggaaaatcctgtagcttgcttatatttttaacatttctttttcaaatttgtggtaactagatgggttcatcaatgaatgtatataggagtgactagtataatgtctagatttatgatttagtaaatgtaattctttcaactgactataaaagtgttaaaagagtcaaattaaaatagaatgttatcagtgaaacagaactgtaataactctgagaaattttatctgtccaaatatgtgtgaactaaggttcttactatagggtggtgtatgggttagatatcaaagtgtaaatgcaattttttgatatattttaatttagtcaaatttgttaatgctttaatttatgcttttgagtttgttgtaattcagggaaaggcttttccaattctgaaattcttaaaaattctctggtgtgcgtgtgtgtgtgtgtgtttacttttataaattcattgactttaaataaatttctgaactttttggaacttatgctctataaagttcaaagttttgcttcaactttttctccagttggatatccacttacagtaacctttttagtatatggatgtgcaggttattctttaacttcagaggtaatcatgatattttattgagtactagctaaaactttcttttgttttatttaggattttcataatcaggaagaaatgaaagatctgatggatgaaaattgcattttgaagacagatattgctatactccgacaggaaatacgcacaatgaaaaatgacaacctggaaaaagaaaataaatatcttaaggacgttaaaattgttaaaaaaaacaaacgctgcccttgaaaagtatataaaactcaatgaggaattgataacaagaacagcattccggtatcaacaagagcttaatgatctcaaagctgagaatacaaggctcaattccgatctgttgaaggaagaagaaagcaacaaaagactggaagctgaaattgaatcatcagtctagactgactgctgctataagtaagcacagtgaaagtgtgaaaacagaaagaaacctaaaacttgcattagagtgaacacaagatgtttccgtacaagtaaaaatgagttctgatatttccgaagtagaagaatgagtttcttactgaacaactttctaaaaagcaaattaaattcaataccttaaaagataagttccgtaagaacagagatactctcagaaaaaagtcattggctttagaaactctccaaacgacctaagccaaacacagcagcaaataaaggaaatgaaagagatgtatgaaaatgcagaagctaaagtgaataattccactggaaagtggagctgtgtagaagagaggatatgtcaactccaacatgaaaatccgtgcattgaacagcaactagatgatgttcatcagaaagaggatcataaagagatagtaactaatatccaaagaggctttattgagagtggaaagaaagaccacatgctagaagagaaaaataagaagctaatgaacgaatgtgatcattaaaaagaaagtctctttcgatatgtgagagagaaagcagaaagagtagtaagtatcaaggaagataaatattttcaaacttttagaaagaaaatttaaacatttggttctggatacatgttgaacttagttgaatataaaaatcaatggataaaaagtgtgtttaccatactgtataattccatttacatgaagcatccagaaaagataaacgtatagggacaaaaagtagactaatgtttgcaaagggctggggctgaaagctggtagtgactgctaatgggcgtcagggatcttgcagtgatggaaatgctgtaaagtttgattgtagagatggctgcacaactcagtaaatggactaaaaattcttttaactttaagttaaaacagatacattctatagtatgtaaattatatttcaacaaagctgttttaataaaaaaaaaggaaaaccgtgtttactataccagcttagaaacgtgccccatttctaggaaataaaaggtagaggtgagagatgatttactttgagaaaagacattgtgtcacctatgaaattttattaggcacagagtcatattttaaggtagatagttctgtactgctgaaataataattttaatgactttatgttgccacatgttaagaccataatgtaagtataaatggaaatgtttacacctgaaatgagtattttcaaattaaaatttaattgattatctttgacacttaattctagatttcccagatgaactgaagtgtattgctgtgtcttgtaataccttgctttaagtagctttttatgtattttagttggtatatctttgttattaatcatattaatttaacaaatctgaaaatatgtcaaattacatatttttatgactatgtaatgttttaaaggcacctacttgttataaaatcataatttaggatacatgtggtaatatttagcaaaactatatttggtttagtcttcccactggtatttatagtttactttgaatatttatattaataattagctcctaatttttatttcaaggcttaatgactatcattggaatataattttgttcagtacaaagatacttgtagctgcctgtgatttatgagtaaggcattagatccctattttcagacagaggggtggcaggcttcacgtacagtgggaatggagtaattacaggagggagttgtaggagctttgaagtcagagagggaggtagagacctgtttacctaggacctcaaaggccattggaattttacttttattctgagataggaatctgttggaaggatttgaacaggtgattgaatatgtgaggaactttgaggttgagttgagcttctaagatgattgaatggtgggatgaatctgttatgtaagtaagagaataccaatttggcaggaagagaacatattgtgcatccctcactgaattcagtaataaataaaaatgtgtacatgtgattaaaagaaggtgaattgatatgtgtggtgataattttcaaagtacgtatgttagagttaaatattattaacataatttaataaggcaatttataaaatcagtaacaaaaatattttctcaggtggttgtgagacaacttcaacaagaagcggctgacagcctaaaaaaattaactatgttagagtctccactggaaggtatatcacattatcacattaatttggatgagacacaggtcccaaagaagaaattatttcaagtggaaagtcaagtatgtatggaacttagcatgtcaactgttattctgtagctagttgaattacataacatgttttaggatacgaattatggcagaagcttgattttttattttcattacaatgaattatttccactttactatctctataatgtacttatttttttatattgtgactttcattctaccattttgaaaaaccattgcataccttttctcttacaatacgtacccttggaaaagttgagaattatatatcattcctcatagaaaactgacttttgtcctgttaaaacagtatttttaagtaatttttgtattgctctgatgaggcaggccagattaaatcagagaagaatgtttcatggaatgttccagaaaattgtcttatttcttcacttttgtgagtggacacagaatctgtgtctatttatttcacagattctaggttaacttgtacagaaaggccattatactattcttttaaaagtgcatgttttaggttaatttacaaactatttgaaaagttaggcattttctttatcttttatttaaaatatactataaaactgtggaaatatttaaatttgagataacatgtacatcaaaaattgagagttgagaaaattatcttgatcctgccttcggattttaaaaacagttacactgagatatcattcacatttgagagagttcaaccatttaaaatgtacaactcagtatctattagtaattcacagcattttcatcaccctgaaaagcaacgctacatctcctaggcatgactgcagccttcctccatgtccctccacctacctctgttgtaggcaaccaccatctatctgcttttgtctccatatgttcgcctgttctgcctatttcatatacatagagttatacaatacgtagtcctttgtgactggctttttcacttagcataatgttttcagaattcacttagcataatgttttagcacacattggtagtttatttcttcttacagttaagtgatattctattccatgtctatactggttttccattcattcatcggttgatggacctttaggttagtttccactgtttagctcttatgaaaaatgctgctgcgaacattcacttacaggttattatgtggacacgcgtttttatttctctgccattggactttatcctcagagttaattgggcagatttcagcacttgtcttgctcatgctatcctttctgccttctcagtttctattcatctagcctcattcactcagaagtggcagacaatttattgttttcatgaagctttctctgagtgttctctcattgaccttatgtgttagcaatcgttgtctagtctttgcagaaaaacttagttcttaattttacatggcttttatttttttatggaagatagttttctctcattataaatttgcttaatgggggaataatatataatatgtgtgccacctatccttgcatacattgaaaatattttagcttagaagtttgtagcatacaattcaatactttataccataccaattatttcttctttgagaccttgacacagtaaggtttatattctaagtgtgtttttagcaattaaatatcaaagccaacccaattagtctaatacaggagactcgttcaatcacatgtttatgtttttctctctatgaaaaagaatctaaattggccttttttcactatgcagcagaactgtgtttctggactgctaccagtttgtcagctgaacagttctgggtgcagcttgtccgatgacggatagcacagcccctcaatatgagtgctcagcagagtgcttgtgaaggcagcaccacagcaacagtttctcagagggaacggattcaggagccttgatttagcaatagagtccagggttttcagctcagtgtctttagcctgtctctgctggtcatgtcagttatgtactattcaatccaggaggtgctgtttacattgtagtacatacatagtcattgcctaatgagtcatacagagagaaaagtaagttataaattatgtcccccatttgctgcaactctcagtggtaagaatgattcagtgcagctataggagagtacttccattggcatgccacctgcctaaaatacacaattttgttaagatatacaataaaattattatgctaatagcaaatattttatgtagctcactatgttccacgtagtcttctaagtgtttcatgttagtccccagttaaacacctggttttggaaggctgaagcaggaggatcgtttgagcccatgagtttgagaccagccagagcaatatagtgagaccctgtctctaaaaaaaaaaaaaaaaaaaaaaaaaaaattaaacacttatctgaggcatggtggtgcacgcctgtagtcccagctacattgggaggctgtggtaggagggtcgtttgagcttggaatattgaggctgtagtgaacagtgatcaagccgctgcactccaggctgggtaacagagggagactctgtctcataaataaaacgttttgtatagattcccatagaagtgagttagacatcagtcatagaattattagccactttgatgtctaccttgggagtaaaacatataataaggggcagcgttaaaccatctcaatcactagcctccaacttctcgagaaggttcttatttcatgaatttctacacaaaagactacctggattaagacatttggtggacaccattttgagatgaagaatcttgagtgagaagaagggagttctctacttactgaagcttcccaatgacatagttaagtgtcccccaaaagaaactttagaacaagactttcatcatgccatatctctatggaaaaggaatttctttaaaagaaaacaaaggcaaacaattgataatatgattctcatgggaaagttttcatcataaaagaaaaagagggctgggtgccgtggctcacgtctgtaatcccaacactttgggaggctgaggtgcgtggattagctgaggtcagcagttcaaaaacagcctggccaacatggtgaaaccctgtctctactgaaaatacaaaaattagccaggtctggtggtgtgcacctgtagtcccagctacttgggatgctgaggcaggagaatcacttgaacccaggaggtggaagttgcagtaagccgagatggtgccactgcactccagcctggatgacacagtgtgactccatctcaaaaaaaagaaaaaaagaaaaacaaaaaagggacaaagtatactggtccaaaaaagaagaaagcaagaaaaaaaggacaaagtatactggttagtatcataacagtgagatagtccccctttgagattagaaaataacagtatactcaaagtaacattaatgagaaccaacataaaatagacaacattcactatctacaaaagtaatctgcaccaattagcaatgtatgagcatgtggttgagaatattttctataatatgtgtactagaaggaagagacctcaagaaaatggtcagagctggaaatgtagattagggaatctaggtcaaagttttgagattttaggagtcctgagagaatttaaaaagagaaatagccaccaggcatggtggccacacctgtaatcccagcactttgggaggccaaggcaggaagatcatgaggtcaggagttaaagaccagtctggccaacaagtttcttatataggtaaacgtgttccatgatggtttgctgcacctatcaatccatcacctagatattaagccctgtgggcattagttattgatcttgatgctctccctcctgaccccaacaggccccagtgtttgttgttcccctccccgagtccatgtgctcttatcgttcagctcccacttataagtgagaagatgcagtgtttggttttttcttcctgcattagtttgctgaagatatcagctttgggttcatccatatccctgcaaagagcatgatcnnnnnnnnnnnnnnnnnnnnnnnnnnnnnnnnnnnnnnnnnnnnnnnnnnnnnnnnnnnnnnnnnnnnnnnnnnnnnnnnnnnnnnnnnnnnnnnnnnnnnnnnnnnnnnnnnnnnnnnnnnnnnnnnnnnnnnnnnnnnnnnnnnnnnnnnnnnnnnnnnnnnnnnnnnnnnnnnnnnnnnnnnnnnnnnnnnnnnnnnnnnnnnnnnnnnnnnnnnnnnnnnnnnnnnnnnnnnnnnnnnnnnnnnnnnnnnnnnnnnnnnnnnnnnnnnnnnnnnnnnnnnnnnnnnnnnnnnnnnnnnnnnnnnnnnnnnnnnnnnnnnnnnnnnnnnnnnnnnnnnnnnnnnnnnnnnnnnnnnnnnnnnnnnnnnnnnnnnnnnnnnnnnnnnnnnnnnnnnnnnnnnnnnnnnnnnnnnnnnnnnnnnnnnnnnnnnnnnnnnnnnnnnnnnnnnnnnnnnnnnnnnnnnnnnnnnnnnnnnnnnnnnnnnnnnnnnnnnnnnnnnnnnnnnnnnnnnnnnnnnnnnnnnnnnnnnnnnnnnnnnnnnnnnnnnnnnnnnnnnnnnnnnnnnnnnnnnnnnnnnnnnnnnnnnnnnnnnnnnnnnnnnnnnnnnnnnnnnnnnnnnnnnnnnnnnnnnnnnnnnnnnnnnnnnnnnnnnnnnnnnnnnnnnnnnnnnnnnnnnnnnnnnnnnnnnnnnnnnnnnnnnnnnnnnnnnnnnnnnnnnnnnnnnnnnnnnnnnnnnnnnnnnnnnnnnnnnnnnnnnnnnnnnnnnnnnnnnnnnnnnnnnnnnnnnnnnnnnnnnnnnnnnnnnnnnnnnnnnnnnnnnnnnnnnnnnnnnnnnnnnnnnnnnnnnnnnnnnnnnnnnnnnnnnnnnnnnnnnnnnnnnnnnnnnnnnnnnnnnnnnnnnnnnnnnnnnnnnnnnnnnnnnnnnnnnnnnnnnnnnnnnnnnnnnnnnnnnnnnnnnnnnnnnnnnnnnnnnnnnnnnnnnnnnnnnnnnnnnnnnnnnnnnnnnnnnnnnnnnnnnnnnnnnnnnnnnnnnnnnnnnnnnnnnnnnnnnnnnnnnnnnnnnnnnnnnnnnnnnnnnnnnnnnnnnnnnnnnnnnnnnnnnnnnnnnnnnnnnnnnnnnnnnnnnnnnnnnnnnnnnnnnnnnnnnnnnnnnnnnnnnnnnnnnnnnnnnnnnnnnnnnnnnnnnnnnnnnnnnnnnnnnnnnnnnnnnnnnnnnnnnnnnnnnnnnnnnnnnnnnnnnnnnnnnnnnnnnnnnnnnnnnnnnnnnnnnnnnnnnnnnnnnnnnnnnnnnnnnnnnnnnnnnnnnnnnnnnnnnnnnnnnnnnnnnnnnnnnnnnnnnnnnnnnnnnnnnnnnnnnnnnnnnnnnnnnnnnnnnnnnnnnnnnnnnnnnnnnnnnnnnnnnnnnnnnnnnnnnnnnnnnnnnnnnnnnnnnnnnnnnnnnnnnnnnnnnnnnnnnnnnnnnnnnnnnnnnnnnnnnnnnnnnnnnnnnnnnnnnnnnnnnnnnnnnnnnnnnnnnnnnnnnnnnnnnnnnnnnnnnnnnnnnnnnnnnnnnnnnnnnnnnnnnnnnnnnnnnnnnnnnnnnnnnnnnnnnnnnnnnnnnnnnnnnnnnnnnnnnnnnnnnnnnnnnnnnnnnnnnnnnnnnnnnnnnnnnnnnnnnnnnnnnnnnnnnnnnnnnnnnnnnnnnnnnnnnnnnnnnnnnnnnnnnnnnnnnnnnnnnnnnnnnnnnnnnnnnnnnnnnnnnnnnnnnnnnnnnnnnnnnnnnnnnnnnnnnnnnnnnnnnnnnnnnnnnnnnnnnnnnnnnnnnnnnnnnnnnnnnnnnnnnnnnnnnnnnnnnnnnnnnnnnnnnnnnnnnnnnnnnnnnnnnnnnnnnnnnnnnnnnnnnnnnnnnnnnnnnnnnnnnnnnnnnnnnnnnnnnnnnnnnnnnnnnnnnnnnnnnnnnnnnnnnnnnnnnnnnnnnnnnnnnnnnnnnnnnnnnnnnnnnnnnnnnnnnnnnnnnnnnnnnnnnnnnnnnnnnnnnnnnnnnnnnnnnnnnnnnnnnnnnnnnnnnnnnnnnnnnnnnnnnnnnnnnnnnnnnnnnnnnnnnnnnnnnnnnnnnnnnnnnnnnnnnnnnnnnnnnnnnnnnnnnnnnnnnnnnnnnnnnnnnnnnnnnnnnnnnnnnnnnnnnnnnnnnnnnnnnnnnnnnnnnnnnnnnnnnnnnnnnnnnnnnnnnnnnnnnnnnnnnnnnnnnnnnnnnnnnnnnnnnnnnnnnnnnnnnnnnnnnnnnnnnnnnnnnnnnnnnnnnnnnnnnnnnnnnnnnnnnnnnnnnnnnnnnnnnnnnnnnnnnnnnnnnnnnnnnnnnnnnnnnnnnnnnnnnnnnnnnnnnnnnnnnnnnnnnnnnnnnnnnnnnnnnnnnnnnnnnnnnnnnnnnnnnnnnnnnnnnnnnnnnnnnnnnnnnnnnnnnnnnnnnnnnnnnnnnnnnnnnnnnnnnnnnnnnnnnnnnnnnnnnnnnnnnnnnnnnnnnnnnnnnnnnnnnnnnnnnnnnnnnnnnnnnnnnnnnnnnnnnnnnnnnnnnnnnnnnnnnnnnnnnnnnnnnnnnnnnnnnnnnnnnnnnnnnnnnnnnnnnnnnnnnnnnnnnnnnnnnnnnnnnnnnnnnnnnnnnnnnnnnnnnnnnnnnnnnnnnnnnnnnnnnnnnnnnnnnnnnnnnnnnnnnnnnnnnnnnnnnnnnnnnnnnnnnnnnnnnnnnnnnnnnnnnnnnnnnnnnnnnnnnnnnnnnnnnnnnnnnnnnnnnnnnnnnnnnnnnnnnnnnnnnnnnnnnnnnnnnnnnnnnnnnnnnnnnnnnnnnnnnnnnnnnnnnnnnnnnnnnnnnnnnnnnnnnnnnnnnnnnnnnnnnnnnnnnnnnnnnnnnnnnnnnnnnnnnnnnnnnnnnnnnnnnnnnnnnnnnnnnnnnnnnnnnnnnnnnnnnnnnnnnnnnnnnnnnnnnnnnnnnnnnnnnnnnnnnnnnnnnnnnnnnnnnnnnnnnnnnnnnnnnnnnnnnnnnnnnnnnnnnnnnnnnnnnnnnnnnnnnnnnnnnnnnnnnnnnnnnnnnnnnnnnnnnnnnnnnnnnnnnnnnnnnnnnnnnnnnnnnnnnnnnnnnnnnnnnnnnnnnnnnnnnnnnnnnnnnnnnnnnnnnnnnnnnnnnnnnnnnnnnnnnnnnnnnnnnnnnnnnnnnnnnnnnnnnnnnnnnnnnnnnnnnnnnnnnnnnnnnnnnnnnnnnnnnnnnnnnnnnnnnnnnnnnnnnnnnnnnnnnnnnnnnnnnnnnnnnnnnnnnnnnnnnnnnnnnnnnnnnnnnnnnnnnnnnnnnnnnnnnnnnnnnnnnnnnnnnnnnnnnnnnnnnnnnnnnnnnnnnnnnnnnnnnnnnnnnnnnnnnnnnnnnnnnnnnnnnnnnnnnnnnnnnnnnnnnnnnnnnnnnnnnnnnnnnnnnnnnnnnnnnnnnnnnnnnnnnnnnnnnnnnnnnnnnnnnnnnnnnnnnnnnnnnnnnnnnnnnnnnnnnnnnnnnnnnnnnnnnnnnnnnnnnnnnnnnnnnnnnnnnnnnnnnnnnnnnnnnnnnnnnnnnnnnnnnnnnnnnnnnnnnnnnnnnnnnnnnnnnnnnnnnnnnnnnnnnnnnnnnnnnnnnnnnnnnnnnnnnnnnnnnnnnnnnnnnnnnnnnnnnnnnnnnnnnnnnnnnnnnnnnnnnnnnnnnnnnnnnnnnnnnnnnnnnnnnnnnnnnnnnnnnnnnnnnnnnnnnnnnnnnnnnnnnnnnnnnnnnnnnnnnnnnnnnnnnnnnnnnnnnnnnnnnnnnnnnnnnnnnnnnnnnnnnnnnnnnnnnnnnnnnnnnnnnnnnnnnnnnnnnnnnnnnnnnnnnnnnnnnnnnnnnnnnnnnnnnnnnnnnnnnnnnnnnnnnnnnnnnnnnnnnnnnnnnnnnnnnnnnnnnnnnnnnnnnnnnnnnnnnnnnnnnnnnnnnnnnnnnnnnnnnnnnnnnnnnnnnnnnnnnnnnnnnnnnnnnnnnnnnnnnnnnnnnnnnnnnnnnnnnnnnnnnnnnnnnnnnnnnnnnnnnnnnnnnnnnnnnnnnnnnnnnnnnnnnnnnnnnnnnnnnnnnnnnnnnnnnnnnnnnnnnnnnnnnnnnnnnnnnnnnnnnnnnnnnnnnnnnnnnnnnnnnnnnnnnnnnnnnnnnnnnnnnnnnnnnnnnnnnnnnnnnnnnnnnnnnnnnnnnnnnnnnnnnnnnnnnnnnnnnnnnnnnnnnnnnnnnnnnnnnnnnnnnnnnnnnnnnnnnnnnnnnnnnnnnnnnnnnnnnnnnnnnnnnnnnnnnnnnnnnnnnnnnnnnnnnnnnnnnnnnnnnnnnnnnnnnnnnnnnnnnnnnnnnnnnnnnnnnnnnnnnnnnnnnnnnnnnnnnnnnnnnnnnnnnnnnnnnnnnnnnnnnnnnnnnnnnnnnnnnnnnnnnnnnnnnnnnnnnnnnnnnnnnnnnnnnnnnnnnnnnnnnnnnnnnnnnnnnnnnnnnnnnnnnnnnnnnnnnnnnnnnnnnnnnnnnnnnnnnnnnnnnnnnnnnnnnnnnnnnnnnnnnnnnnnnnnnnnnnnnnnnnnnnnnnnnnnnnnnnnnnnnnnnnnnnnnnnnnnnnnnnnnnnnnnnnnnnnnnnnnnnnnnnnnnnnnnnnnnnnnnnnnnnnnnnnnnnnnnnnnnnnnnnnnnnnnnnnnnnnnnnnnnnnnnnnnnnnnnnnnnnnnnnnnnnnnnnnnnnnnnnnnnnnnnnnnnnnnnnnnnnnnnnnnnnnnnnnnnnnnnnnnnnnnnnnnnnnnnnnnnnnnnnnnnnnnnnnnnnnnnnnnnnnnnnnnnnnnnnnnnnnnnnnnnnnnnnnnnnnnnnnnnnnnnnnnnnnnnnnnnnnnnnnnnnnnnnnnnnnnnnnnnnnnnnnnnnnnnnnnnnnnnnnnnnnnnnnnnnnnnnnnnnnnnnnnnnnnnnnnnnnnnnnnnnnnnnnnnnnnnnnnnnnnnnnnnnnnnnnnnnnnnnnnnnnnnnnnnnnnnnnnnnnnnnnnnnnnnnnnnnnnnnnnnnnnnnnnnnnnnnnnnnnnnnnnnnnnnnnnnnnnnnnnnnnnnnnnnnnnnnnnnnnnnnnnnnnnnnnnnnnnnnnnnnnnnnnnnnnnnnnnnnnnnnnnnnnnnnnnnnnnnnnnnnnnnnnnnnnnnnnnnnnnnnnnnnnnnnnnnnnnnnnnnnnnnnnnnnnnnnnnnnnnnnnnnnnnnnnnnnnnnnnnnnnnnnnnnnnnnnnnnnnnnnnnnnnnnnnnnnnnnnnnnnnnnnnnnnnnnnnnnnnnnnnnnnnnnnnnnnnnnnnnnnnnnnnnnnnnnnnnnnnnnnnnnnnnnnnnnnnnnnnnnnnnnnnnnnnnnnnnnnnnnnnnnnnnnnnnnnnnnnnnnnnnnnnnnnnnnnnnnnnnnnnnnnnnnnnnnnnnnnnnnnnnnnnnnnnnnnnnnnnnnnnnnnnnnnnnnnnnnnnnnnnnnnnnnnnnnnnnnnnnnnnnnnnnnnnnnnnnnnnnnnnnnnnnnnnnnnnnnnnnnnnnnnnnnnnnnnnnnnnnnnnnnnnnnnnnnnnnnnnnnnnnnnnnnnnnnnnnnnnnnnnnnnnnnnnnnnnnnnnnnnnnnnnnnnnnnnnnnnnnnnnnnnnnnnnnnnnnnnnnnnnnnnnnnnnnnnnnnnnnnnnnnnnnnnnnnnnnnnnnnnnnnnnnnnnnnnnnnnnnnnnnnnnnnnnnnnnnnnnnnnnnnnnnnnnnnnnnnnnnnnnnnnnnnnnnnnnnnnnnnnnnnnnnnnnnnnnnnnnnnnnnnnnnnnnnnnnnnnnnnnnnnnnnnnnnnnnnnnnnnnnnnnnnnnnnnnnnnnnnnnnnnnnnnnnnnnnnnnnnnnnnnnnnnnnnnnnnnnnnnnnnnnnnnnnnnnnnnnnnnnnnnnnnnnnnnnnnnnnnnnnnnnnnnnnnnnnnnnnnnnnnnnnnnnnnnnnnnnnnnnnnnnnnnnnnnnnnnnnnnnnnnnnnnnnnnnnnnnnnnnnnnnnnnnnnnnnnnnnnnnnnnnnnnnnnnnnnnnnnnnnnnnnnnnnnnnnnnnnnnnnnnnnnnnnnnnnnnnnnnnnnnnnnnnnnnnnnnnnnnnnnnnnnnnnnnnnnnnnnnnnnnnnnnnnnnnnnnnnnnnnnnnnnnnnnnnnnnnnnnnnnnnnnnnnnnnnnnnnnnnnnnnnnnnnnnnnnnnnnnnnnnnnnnnnnnnnnnnnnnnnnnnnnnnnnnnnnnnnnnnnnnnnnnnnnnnnnnnnnnnnnnnnnnnnnnnnnnnnnnnnnnnnnnnnnnnnnnnnnnnnnnnnnnnnnnnnnnnnnnnnnnnnnnnnnnnnnnnnnnnnnnnnnnnnnnnnnnnnnnnnnnnnnnnnnnnnnnnnnnnnnnnnnnnnnnnnnnnnnnnnnnnnnnnnnnnnnnnnnnnnnnnnnnnnnnnnnnnnnnnnnnnnnnnnnnnnnnnnnnnnnnnnnnnnnnnnnnnnnnnnnnnnnnnnnnnnnnnnnnnnnnnnnnnnnnnnnnnnnnnnnnnnnnnnnnnnnnnnnnnnnnnnnnnnnnnnnnnnnnnnnnnnnnnnnnnnnnnnnnnnnnnnnnnnnnnnnnnnnnnnnnnnnnnnnnnnnnnnnnnnnnnnnnnnnnnnnnnnnnnnnnnnnnnnnnnnnnnnnnnnnnnnnnnnnnnnnnnnnnnnnnnnnnnnnnnnnnnnnnnnnnnnnnnnnnnnnnnnnnnnnnnnnnnnnnnnnnnnnnnnnnnnnnnnnnnnnnnnnnnnnnnnnnnnnnnnnnnnnnnnnnnnnnnnnnnnnnnnnnnnnnnnnnnnnnnnnnnnnnnnnnnnnnnnnnnnnnnnnnnnnnnnnnnnnnnnnnnnnnnnnnnnnnnnnnnnnnnnnnnnnnnnnnnnnnnnnnnnnnnnnnnnnnnnnnnnnnnnnnnnnnnnnnnnnnnnnnnnnnnnnnnnnnnnnnnnnnnnnnnnnnnnnnnnnnnnnnnnnnnnnnnnnnnnnnnnnnnnnnnnnnnnnnnnnnnnnnnnnnnnnnnnnnnnnnnnnnnnnnnnnnnnnnnnnnnnnnnnnnnnnnnnnnnnnnnnnnnnnnnnnnnnnnnnnnnnnnnnnnnnnnnnnnnnnnnnnnnnnnnnnnnnnnnnnnnnnnnnnnnnnnnnnnnnnnnnnnnnnnnnnnnnnnnnnnnnnnnnnnnnnnnnnnnnnnnnnnnnnnnnnnnnnnnnnnnnnnnnnnnnnnnnnnnnnnnnnnnnnnnnnnnnnnnnnnnnnnnnnnnnnnnnnnnnnnnnnnnnnnnnnnnnnnnnnnnnnnnnnnnnnnnnnnnnnnnnnnnnnnnnnnnnnnnnnnnnnnnnnnnnnnnnnnnnnnnnnnnnnnnnnnnnnnnnnnnnnnnnnnnnnnnnnnnnnnnnnnnnnnnnnnnnnnnnnnnnnnnnnnnnnnnnnnnnnnnnnnnnnnnnnnnnnnnnnnnnnnnnnnnnnnnnnnnnnnnnnnnnnnnnnnnnnnnnnnnnnnnnnnnnnnnnnnnnnnnnnnnnnnnnnnnnnnnnnnnnnnnnnnnnnnnnnnnnnnnnnnnnnnnnnnnnnnnnnnnnnnnnnnnnnnnnnnnnnnnnnnnnnnnnnnnnnnnnnnnnnnnnnnnnnnnnnnnnnnnnnnnnnnnnnnnnnnnnnnnnnnnnnnnnnnnnnnnnnnnnnnnnnnnnnnnnnnnnnnnnnnnnnnnnnnnnnnnnnnnnnnnnnnnnnnnnnnnnnnnnnnnnnnnnnnnnnnnnnnnnnnnnnnnnnnnnnnnnnnnnnnnnnnnnnnnnnnnnnnnnnnnnnnnnnnnnnnnnnnnnnnnnnnnnnnnnnnnnnnnnnnnnnnnnnnnnnnnnnnnnnnnnnnnnnnnnnnnnnnnnnnnnnnnnnnnnnnnnnnnnnnnnnnnnnnnnnnnnnnnnnnnnnnnnnnnnnnnnnnnnnnnnnnnnnnnnnnnnnnnnnnnnnnnnnnnnnnnnnnnnnnnnnnnnnnnnnnnnnnnnnnnnnnnnnnnnnnnnnnnnnnnnnnnnnnnnnnnnnnnnnnnnnnnnnnnnnnnnnnnnnnnnnnnnnnnnnnnnnnnnnnnnnnnnnnnnnnnnnnnnnnnnnnnnnnnnnnnnnnnnnnnnnnnnnnnnnnnnnnnnnnnnnnnnnnnnnnnnnnnnnnnnnnnnnnnnnnnnnnnnnnnnnnnnnnnnnnnnnnnnnnnnnnnnnnnnnnnnnnnnnnnnnnnnnnnnnnnnnnnnnnnnnnnnnnnnnnnnnnnnnnnnnnnnnnnnnnnnnnnnnnnnnnnnnnnnnnnnnnnnnnnnnnnnnnnnnnnnnnnnnnnnnnnnnnnnnnnnnnnnnnnnnnnnnnnnnnnnnnnnnnnnnnnnnnnnnnnnnnnnnnnnnnnnnnnnnnnnnnnnnnnnnnnnnnnnnnnnnnnnnnnnnnnnnnnnnnnnnnnnnnnnnnnnnnnnnnnnnnnnnnnnnnnnnnnnnnnnnnnnnnnnnnnnnnnnnnnnnnnnnnnnnnnnnnnnnnnnnnnnnnnnnnnnnnnnnnnnnnnnnnnnnnnnnnnnnnnnnnnnnnnnnnnnnnnnnnnnnnnnnnnnnnnnnnnnnnnnnnnnnnnnnnnnnnnnnnnnnnnnnnnnnnnnnnnnnnnnnnnnnnnnnnnnnnnnnnnnnnnnnnnnnnnnnnnnnnnnnnnnnnnnnnnnnnnnnnnnnnnnnnnnnnnnnnnnnnnnnnnnnnnnnnnnnnnnnnnnnnnnnnnnnnnnnnnnnnnnnnnnnnnnnnnnnnnnnnnnnnnnnnnnnnnnnnnnnnnnnnnnnnnnnnnnnnnnnnnnnnnnnnnnnnnnnnnnnnnnnnnnnnnnnnnnnnnnnnnnnnnnnnnnnnnnnnnnnnnnnnnnnnnnnnnnnnnnnnnnnnnnnnnnnnnnnnnnnnnnnnnnnnnnnnnnnnnnnnnnnnnnnnnnnnnnnnnnnnnnnnnnnnnnnnnnnnnnnnnnnnnnnnnnnnnnnnnnnnnnnnnnnnnnnnnnnnnnnnnnnnnnnnnnnnnnnnnnnnnnnnnnnnnnnnnnnnnnnnnnnnnnnnnnnnnnnnnnnnnnnnnnnnnnnnnnnnnnnnnnnnnnnnnnnnnnnnnnnnnnnnnnnnnnnnnnnnnnnnnnnnnnnnnnnnnnnnnnnnnnnnnnnnnnnnnnnnnnnnnnnnnnnnnnnnnnnnnnnnnnnnnnnnnnnnnnnnnnnnnnnnnnnnnnnnnnnnnnnnnnnnnnnnnnnnnnnnnnnnnnnnnnnnnnnnnnnnnnnnnnnnnnnnnnnnnnnnnnnnnnnnnnnnnnnnnnnnnnnnnnnnnnnnnnnnnnnnnnnnnnnnnnnnnnnnnnnnnnnnnnnnnnnnnnnnnnnnnnnnnnnnnnnnnnnnnnnnnnnnnnnnnnnnnnnnnnnnnnnnnnnnnnnnnnnnnnnnnnnnnnnnnnnnnnnnnnnnnnnnnnnnnnnnnnnnnnnnnnnnnnnnnnnnnnnnnnnnnnnnnnnnnnnnnnnnnnnnnnnnnnnnnnnnnnnnnnnnnnnnnnnnnnnnnnnnnnnnnnnnnnnnnnnnnnnnnnnnnnnnnnnnnnnnnnnnnnnnnnnnnnnnnnnnnnnnnnnnnnnnnnnnnnnnnnnnnnnnnnnnnnnnnnnnnnnnnnnnnnnnnnnnnnnnnnnnnnnnnnnnnnnnnnnnnnnnnnnnnnnnnnnnnnnnnnnnnnnnnnnnnnnnnnnnnnnnnnnnnnnnnnnnnnnnnnnnnnnnnnnnnnnnnnnnnnnnnnnnnnnnnnnnnnnnnnnnnnnnnnnnnnnnnnnnnnnnnnnnnnnnnnnnnnnnnnnnnnnnnnnnnnnnnnnnnnnnnnnnnnnnnnnnnnnnnnnnnnnnnnnnnnnnnnnnnnnnnnnnnnnnnnnnnnnnnnnnnnnnnnnnnnnnnnnnnnnnnnnnnnnnnnnnnnnnnnnnnnnnnnnnnnnnnnnnnnnnnnnnnnnnnnnnnnnnnnnnnnnnnnnnnnnnnnnnnnnnnnnnnnnnnnnnnnnnnnnnnnnnnnnnnnnnnnnnnnnnnnnnnnnnnnnnnnnnnnnnnnnnnnnnnnnnnnnnnnnnnnnnnnnnnnnnnnnnnnnnnnnnnnnnnnnnnnnnnnnnnnnnnnnnnnnnnnnnnnnnnnnnnnnnnnnnnnnnnnnnnnnnnnnnnnnnnnnnnnnnnnnnnnnnnnnnnnnnnnnnnnnnnnnnnnnnnnnnnnnnnnnnnnnnnnnnnnnnnnnnnnnnnnnnnnnnnnnnnnnnnnnnnnnnnnnnnnnnnnnnnnnnnnnnnnnnnnnnnnnnnnnnnnnnnnnnnnnnnnnnnnnnnnnnnnnnnnnnnnnnnnnnnnnnnnnnnnnnnnnnnnnnnnnnnnnnnnnnnnnnnnnnnnnnnnnnnnnnnnnnnnnnnnnnnnnnnnnnnnnnnnnnnnnnnnnnnnnnnnnnnnnnnnnnnnnnnnnnnnnnnnnnnnnnnnnnnnnnnnnnnnnnnnnnnnnnnnnnnnnnnnnnnnnnnnnnnnnnnnnnnnnnnnnnnnnnnnnnnnnnnnnnnnnnnnnnnnnnnnnnnnnnnnnnnnnnnnnnnnnnnnnnnnnnnnnnnnnnnnnnnnnnnnnnnnnnnnnnnnnnnnnnnnnnnnnnnnnnnnnnnnnnnnnnnnnnnnnnnnnnnnnnnnnnnnnnnnnnnnnnnnnnnnnnnnnnnnnnnnnnnnnnnnnnnnnnnnnnnnnnnnnnnnnnnnnnnnnnnnnnnnnnnnnnnnnnnnnnnnnnnnnnnnnnnnnnnnnnnnnnnnnnnnnnnnnnnnnnnnnnnnnnnnnnnnnnnnnnnnnnnnnnnnnnnnnnnnnnnnnnnnnnnnnnnnnnnnnnnnnnnnnnnnnnnnnnnnnnnnnnnnnnnnnnnnnnnnnnnnnnnnnnnnnnnnnnnnnnnnnnnnnnnnnnnnnnnnnnnnnnnnnnnnnnnnnnnnnnnnnnnnnnnnnnnnnnnnnnnnnnnnnnnnnnnnnnnnnnnnnnnnnnnnnnnnnnnnnnnnnnnnnnnnnnnnnnnnnnnnnnnnnnnnnnnnnnnnnnnnnnnnnnnnnnnnnnnnnnnnnnnnnnnnnnnnnnnnnnnnnnnnnnnnnnnnnnnnnnnnnnnnnnnnnnnnnnnnnnnnnnnnnnnnnnnnnnnnnnnnnnnnnnnnnnnnnnnnnnnnnnnnnnnnnnnnnnnnnnnnnnnnnnnnnnnnnnnnnnnnnnnnnnnnnnnnnnnnnnnnnnnnnnnnnnnnnnnnnnnnnnnnnnnnnnnnnnnnnnnnnnnnnnnnnnnnnnnnnnnnnnnnnnnnnnnnnnnnnnnnnnnnnnnnnnnnnnnnnnnnnnnnnnnnnnnnnnnnnnnnnnnnnnnnnnnnnnnnnnnnnnnnnnnnnnnnnnnnnnnnnnnnnnnnnnnnnnnnnnnnnnnnnnnnnnnnnnnnnnnnnnnnnnnnnnnnnnnnnnnnnnnnnnnnnnnnnnnnnnnnnnnnnnnnnnnnnnnnnnnnnnnnnnnnnnnnnnnnnnnnnnnnnnnnnnnnnnnnnnnnnnnnnnnnnnnnnnnnnnnnnnnnnnnnnnnnnnnnnnnnnnnnnnnnnnnnnnnnnnnnnnnnnnnnnnnnnnnnnnnnnnnnnnnnnnnnnnnnnnnnnnnnnnnnnnnnnnnnnnnnnnnnnnnnnnnnnnnnnnnnnnnnnnnnnnnnnnnnnnnnnnnnnnnnnnnnnnnnnnnnnnnnnnnnnnnnnnnnnnnnnnnnnnnnnnnnnnnnnnnnnnnnnnnnnnnnnnnnnnnnnnnnnnnnnnnnnnnnnnnnnnnnnnnnnnnnnnnnnnnnnnnnnnnnnnnnnnnnnnnnnnnnnnnnnnnnnnnnnnnnnnnnnnnnnnnnnnnnnnnnnnnnnnnnnnnnnnnnnnnnnnnnnnnnnnnnnnnnnnnnnnnnnnnnnnnnnnnnnnnnnnnnnnnnnnnnnnnnnnnnnnnnnnnnnnnnnnnnnnnnnnnnnnnnnnnnnnnnnnnnnnnnnnnnnnnnnnnnnnnnnnnnnnnnnnnnnnnnnnnnnnnnnnnnnnnnnnnnnnnnnnnnnnnnnnnnnnnnnnnnnnnnnnnnnnnnnnnnnnnnnnnnnnnnnnnnnnnnnnnnnnnnnnnnnnnnnnnnnnnnnnnnnnnnnnnnnnnnnnnnnnnnnnnnnnnnnnnnnnnnnnnnnnnnnnnnnnnnnnnnnnnnnnnnnnnnnnnnnnnnnnnnnnnnnnnnnnnnnnnnnnnnnnnnnnnnnnnnnnnnnnnnnnnnnnnnnnnnnnnnnnnnnnnnnnnnnnnnnnnnnnnnnnnnnnnnnnnnnnnnnnnnnnnnnnnnnnnnnnnnnnnnnnnnnnnnnnnnnnnnnnnnnnnnnnnnnnnnnnnnnnnnnnnnnnnnnnnnnnnnnnnnnnnnnnnnnnnnnnnnnnnnnnnnnnnnnnnnnnnnnnnnnnnnnnnnnnnnnnnnnnnnnnnnnnnnnnnnnnnnnnnnnnnnnnnnnnnnnnnnnnnnnnnnnnnnnnnnnnnnnnnnnnnnnnnnnnnnnnnnnnnnnnnnnnnnnnnnnnnnnnnnnnnnnnnnnnnnnnnnnnnnnnnnnnnnnnnnnnnnnnnnnnnnnnnnnnnnnnnnnnnnnnnnnnnnnnnnnnnnnnnnnnnnnnnnnnnnnnnnnnnnnnnnnnnnnnnnnnnnnnnnnnnnnnnnnnnnnnnnnnnnnnnnnnnnnnnnnnnnnnnnnnnnnnnnnnnnnnnnnnnnnnnnnnnnnnnnnnnnnnnnnnnnnnnnnnnnnnnnnnnnnnnnnnnnnnnnnnnnnnnnnnnnnnnnnnnnnnnnnnnnnnnnnnnnnnnnnnnnnnnnnnnnnnnnnnnnnnnnnnnnnnnnnnnnnnnnnnnnnnnnnnnnnnnnnnnnnnnnnnnnnnnnnnnnnnnnnnnnnnnnnnnnnnnnnnnnnnnnnnnnnnnnnnnnnnnnnnnnnnnnnnnnnnnnnnnnnnnnnnnnnnnnnnnnnnnnnnnnnnnnnnnnnnnnnnnnnnnnnnnnnnnnnnnnnnnnnnnnnnnnnnnnnnnnnnnnnnnnnnnnnnnnnnnnnnnnnnnnnnnnnnnnnnnnnnnnnnnnnnnnnnnnnnnnnnnnnnnnnnnnnnnnnnnnnnnnnnnnnnnnnnnnnnnnnnnnnnnnnnnnnnnnnnnnnnnnnnnnnnnnnnnnnnnnnnnnnnnnnnnnnnnnnnnnnnnnnnnnnnnnnnnnnnnnnnnnnnnnnnnnnnnnnnnnnnnnnnnnnnnnnnnnnnnnnnnnnnnnnnnnnnnnnnnnnnnnnnnnnnnnnnnnnnnnnnnnnnnnnnnnnnnnnnnnnnnnnnnnnnnnnnnnnnnnnnnnnnnnnnnnnnnnnnnnnnnnnnnnnnnnnnnnnnnnnnnnnnnnnnnnnnnnnnnnnnnnnnnnnnnnnnnnnnnnnnnnnnnnnnnnnnnnnnnnnnnnnnnnnnnnnnnnnnnnnnnnnnnnnnnnnnnnnnnnnnnnnnnnnnnnnnnnnnnnnnnnnnnnnnnnnnnnnnnnnnnnnnnnnnnnnnnnnnnnnnnnnnnnnnnnnnnnnnnnnnnnnnnnnnnnnnnnnnnnnnnnnnnnnnnnnnnnnnnnnnnnnnnnnnnnnnnnnnnnnnnnnnnnnnnnnnnnnnnnnnnnnnnnnnnnnnnnnnnnnnnnnnnnnnnnnnnnnnnnnnnnnnnnnnnnnnnnnnnnnnnnnnnnnnnnnnnnnnnnnnnnnnnnnnnnnnnnnnnnnnnnnnnnnnnnnnnnnnnnnnnnnnnnnnnnnnnnnnnnnnnnnnnnnnnnnnnnnnnnnnnnnnnnnnnnnnnnnnnnnnnnnnnnnnnnnnnnnnnnnnnnnnnnnnnnnnnnnnnnnnnnnnnnnnnnnnnnnnnnnnnnnnnnnnnnnnnnnnnnnnnnnnnnnnnnnnnnnnnnnnnnnnnnnnnnnnnnnnnnnnnnnnnnnnnnnnnnnnnnnnnnnnnnnnnnnnnnnnnnnnnnnnnnnnnnnnnnnnnnnnnnnnnnnnnnnnnnnnnnnnnnnnnnnnnnnnnnnnnnnnnnnnnnnnnnnnnnnnnnnnnnnnnnnnnnnnnnnnnnnnnnnnnnnnnnnnnnnnnnnnnnnnnnnnnnnnnnnnnnnnnnnnnnnnnnnnnnnnnnnnnnnnnnnnnnnnnnnnnnnnnnnnnnnnnnnnnnnnnnnnnnnnnnnnnnnnnnnnnnnnnnnnnnnnnnnnnnnnnnnnnnnnnnnnnnnnnnnnnnnnnnnnnnnnnnnnnnnnnnnnnnnnnnnnnnnnnnnnnnnnnnnnnnnnnnnnnnnnnnnnnnnnnnnnnnnnnnnnnnnnnnnnnnnnnnnnnnnnnnnnnnnnnnnnnnnnnnnnnnnnnnnnnnnnnnnnnnnnnnnnnnnnnnnnnnnnnnnnnnnnnnnnnnnnnnnnnnnnnnnnnnnnnnnnnnnnnnnnnnnnnnnnnnnnnnnnnnnnnnnnnnnnnnnnnnnnnnnnnnnnnnnnnnnnnnnnnnnnnnnnnnnnnnnnnnnnnnnnnnnnnnnnnnnnnnnnnnnnnnnnnnnnnnnnnnnnnnnnnnnnnnnnnnnnnnnnnnnnnnnnnnnnnnnnnnnnnnnnnnnnnnnnnnnnnnnnnnnnnnnnnnnnnnnnnnnnnnnnnnnnnnnnnnnnnnnnnnnnnnnnnnnnnnnnnnnnnnnnnnnnnnnnnnnnnnnnnnnnnnnnnnnnnnnnnnnnnnnnnnnnnnnnnnnnnnnnnnnnnnnnnnnnnnnnnnnnnnnnnnnnnnnnnnnnnnnnnnnnnnnnnnnnnnnnnnnnnnnnnnnnnnnnnnnnnnnnnnnnnnnnnnnnnnnnnnnnnnnnnnnnnnnnnnnnnnnnnnnnnnnnnnnnnnnnnnnnnnnnnnnnnnnnnnnnnnnnnnnnnnnnnnnnnnnnnnnnnnnnnnnnnnnnnnnnnnnnnnnnnnnnnnnnnnnnnnnnnnnnnnnnnnnnnnnnnnnnnnnnnnnnnnnnnnnnnnnnnnnnnnnnnnnnnnnnnnnnnnnnnnnnnnnnnnnnnnnnnnnnnnnnnnnnnnnnnnnnnnnnnnnnnnnnnnnnnnnnnnnnnnnnnnnnnnnnnnnnnnnnnnnnnnnnnnnnnnnnnnnnnnnnnnnnnnnnnnnnnnnnnnnnnnnnnnnnnnnnnnnnnnnnnnnnnnnnnnnnnnnnnnnnnnnnnnnnnnnnnnnnnnnnnnnnnnnnnnnnnnnnnnnnnnnnnnnnnnnnnnnnnnnnnnnnnnnnnnnnnnnnnnnnnnnnnnnnnnnnnnnnnnnnnnnnnnnnnnnnnnnnnnnnnnnnnnnnnnnnnnnnnnnnnnnnnnnnnnnnnnnnnnnnnnnnnnnnnnnnnnnnnnnnnnnnnnnnnnnnnnnnnnnnnnnnnnnnnnnnnnnnnnnnnnnnnnnnnnnnnnnnnnnnnnnnnnnnnnnnnnnnnnnnnnnnnnnnnnnnnnnnnnnnnnnnnnnnnnnnnnnnnnnnnnnnnnnnnnnnnnnnnnnnnnnnnnnnnnnnnnnnnnnnnnnnnnnnnnnnnnnnnnnnnnnnnnnnnnnnnnnnnnnnnnnnnnnnnnnnnnnnnnnnnnnnnnnnnnnnnnnnnnnnnnnnnnnnnnnnnnnnnnnnnnnnnnnnnnnnnnnnnnnnnnnnnnnnnnnnnnnnnnnnnnnnnnnnnnnnnnnnnnnnnnnnnnnnnnnnnnnnnnnnnnnnnnnnnnnnnnnnnnnnnnnnnnnnnnnnnnnnnnnnnnnnnnnnnnnnnnnnnnnnnnnnnnnnnnnnnnnnnnnnnnnnnnnnnnnnnnnnnnnnnnnnnnnnnnnnnnnnnnnnnnnnnnnnnnnnnnnnnnnnnnnnnnnnnnnnnnnnnnnnnnnnnnnnnnnnnnnnnnnnnnnnnnnnnnnnnnnnnnnnnnnnnnnnnnnnnnnnnnnnnnnnnnnnnnnnnnnnnnnnnnnnnnnnnnnnnnnnnnnnnnnnnnnnnnnnnnnnnnnnnnnnnnnnnnnnnnnnnnnnnnnnnnnnnnnnnnnnnnnnnnnnnnnnnnnnnnnnnnnnnnnnnnnnnnnnnnnnnnnnnnnnnnnnnnnnnnnnnnnnnnnnnnnnnnnnnnnnnnnnnnnnnnnnnnnnnnnnnnnnnnnnnnnnnnnnnnnnnnnnnnnnnnnnnnnnnnnnnnnnnnnnnnnnnnnnnnnnnnnnnnnnnnnnnnnnnnnnnnnnnnnnnnnnnnnnnnnnnnnnnnnnnnnnnnnnnnnnnnnnnnnnnnnnnnnnnnnnnnnnnnnnnnnnnnnnnnnnnnnnnnnnnnnnnnnnnnnnnnnnnnnnnnnnnnnnnnnnnnnnnnnnnnnnnnnnnnnnnnnnnnnnnnnnnnnnnnnnnnnnnnnnnnnnnnnnnnnnnnnnnnnnnnnnnnnnnnnnnnnnnnnnnnnnnnnnnnnnnnnnnnnnnnnnnnnnnnnnnnnnnnnnnnnnnnnnnnnnnnnnnnnnnnnnnnnnnnnnnnnnnnnnnnnnnnnnnnnnnnnnnnnnnnnnnnnnnnnnnnnnnnnnnnnnnnnnnnnnnnnnnnnnnnnnnnnnnnnnnnnnnnnnnnnnnnnnnnnnnnnnnnnnnnnnnnnnnnnnnnnnnnnnnnnnnnnnnnnnnnnnnnnnnnnnnnnnnnnnnnnnnnnnnnnnnnnnnnnnnnnnnnnnnnnnnnnnnnnnnnnnnnnnnnnnnnnnnnnnnnnnnnnnnnnnnnnnnnnnnnnnnnnnnnnnnnnnnnnnnnnnnnnnnnnnnnnnnnnnnnnnnnnnnnnnnnnnnnnnnnnnnnnnnnnnnnnnnnnnnnnnnnnnnnnnnnnnnnnnnnnnnnnnnnnnnnnnnnnnnnnnnnnnnnnnnnnnnnnnnnnnnnnnnnnnnnnnnnnnnnnnnnnnnnnnnnnnnnnnnnnnnnnnnnnnnnnnnnnnnnnnnnnnnnnnnnnnnnnnnnnnnnnnnnnnnnnnnnnnnnnnnnnnnnnnnnnnnnnnnnnnnnnnnnnnnnnnnnnnnnnnnnnnnnnnnnnnnnnnnnnnnnnnnnnnnnnnnnnnnnnnnnnnnnnnnnnnnnnnnnnnnnnnnnnnnnnnnnnnnnnnnnnnnnnnnnnnnnnnnnnnnnnnnnnnnnnnnnnnnnnnnnnnnnnnnnnnnnnnnnnnnnnnnnnnnnnnnnnnnnnnnnnnnnnnnnnnnnnnnnnnnnnnnnnnnnnnnnnnnnnnnnnnnnnnnnnnnnnnnnnnnnnnnnnnnnnnnnnnnnnnnnnnnnnnnnnnnnnnnnnnnnnnnnnnnnnnnnnnnnnnnnnnnnnnnnnnnnnnnnnnnnnnnnnnnnnnnnnnnnnnnnnnnnnnnnnnnnnnnnnnnnnnnnnnnnnnnnnnnnnnnnnnnnnnnnnnnnnnnnnnnnnnnnnnnnnnnnnnnnnnnnnnnnnnnnnnnnnnnnnnnnnnnnnnnnnnnnnnnnnnnnnnnnnnnnnnnnnnnnnnnnnnnnnnnnnnnnnnnnnnnnnnnnnnnnnnnnnnnnnnnnnnnnnnnnnnnnnnnnnnnnnnnnnnnnnnnnnnnnnnnnnnnnnnnnnnnnnnnnnnnnnnnnnnnnnnnnnnnnnnnnnnnnnnnnnnnnnnnnnnnnnnnnnnnnnnnnnnnnnnnnnnnnnnnnnnnnnnnnnnnnnnnnnnnnnnnnnnnnnnnnnnnnnnnnnnnnnnnnnnnnnnnnnnnnnnnnnnnnnnnnnnnnnnnnnnnnnnnnnnnnnnnnnnnnnnnnnnnnnnnnnnnnnnnnnnnnnnnnnnnnnnnnnnnnnnnnnnnnnnnnnnnnnnnnnnnnnnnnnnnnnnnnnnnnnnnnnnnnnnnnnnnnnnnnnnnnnnnnnnnnnnnnnnnnnnnnnnnnnnnnnnnnnnnnnnnnnnnnnnnnnnnnnnnnnnnnnnnnnnnnnnnnnnnnnnnnnnnnnnnnnnnnnnnnnnnnnnnnnnnnnnnnnnnnnnnnnnnnnnnnnnnnnnnnnnnnnnnnnnnnnnnnnnnnnnnnnnnnnnnnnnnnnnnnnnnnnnnnnnnnnnnnnnnnnnnnnnnnnnnnnnnnnnnnnnnnnnnnnnnnnnnnnnnnnnnnnnnnnnnnnnnnnnnnnnnnnnnnnnnnnnnnnnnnnnnnnnnnnnnnnnnnnnnnnnnnnnnnnnnnnnnnnnnnnnnnnnnnnnnnnnnnnnnnnnnnnnnnnnnnnnnnnnnnnnnnnnnnnnnnnnnnnnnnnnnnnnnnnnnnnnnnnnnnnnnnnnnnnnnnnnnnnnnnnnnnnnnnnnnnnnnnnnnnnnnnnnnnnnnnnnnnnnnnnnnnnnnnnnnnnnnnnnnnnnnnnnnnnnnnnnnnnnnnnnnnnnnnnnnnnnnnnnnnnnnnnnnnnnnnnnnnnnnnnnnnnnnnnnnnnnnnnnnnnnnnnnnnnnnnnnnnnnnnnnnnnnnnnnnnnnnnnnnnnnnnnnnnnnnnnnnnnnnnnnnnnnnnnnnnnnnnnnnnnnnnnnnnnnnnnnnnnnnnnnnnnnnnnnnnnnnnnnnnnnnnnnnnnnnnnnnnnnnnnnnnnnnnnnnnnnnnnnnnnnnnnnnnnnnnnnnnnnnnnnnnnnnnnnnnnnnnnnnnnnnnnnnnnnnnnnnnnnnnnnnnnnnnnnnnnnnnnnnnnnnnnnnnnnnnnnnnnnnnnnnnnnnnnnnnnnnnnnnnnnnnnnnnnnnnnnnnnnnnnnnnnnnnnnnnnnnnnnnnnnnnnnnnnnnnnnnnnnnnnnnnnnnnnnnnnnnnnnnnnnnnnnnnnnnnnnnnnnnnnnnnnnnnnnnnnnnnnnnnnnnnnnnnnnnnnnnnnnnnnnnnnnnnnnnnnnnnnnnnnnnnnnnnnnnnnnnnnnnnnnnnnnnnnnnnnnnnnnnnnnnnnnnnnnnnnnnnnnnnnnnnnnnnnnnnnnnnnnnnnnnnnnnnnnnnnnnnnnnnnnnnnnnnnnnnnnnnnnnnnnnnnnnnnnnnnnnnnnnnnnnnnnnnnnnnnnnnnnnnnnnnnnnnnnnnnnnnnnnnnnnnnnnnnnnnnnnnnnnnnnnnnnnnnnnnnnnnnnnnnnnnnnnnnnnnnnnnnnnnnnnnnnnnnnnnnnnnnnnnnnnnnnnnnnnnnnnnnnnnnnnnnnnnnnnnnnnnnnnnnnnnnnnnnnnnnnnnnnnnnnnnnnnnnnnnnnnnnnnnnnnnnnnnnnnnnnnnnnnnnnnnnnnnnnnnnnnnnnnnnnnnnnnnnnnnnnnnnnnnnnnnnnnnnnnnnnnnnnnnnnnnnnnnnnnnnnnnnnnnnnnnnnnnnnnnnnnnnnnnnnnnnnnnnnnnnnnnnnnnnnnnnnnnnnnnnnnnnnnnnnnnnnnnnnnnnnnnnnnnnnnnnnnnnnnnnnnnnnnnnnnnnnnnnnnnnnnnnnnnnnnnnnnnnnnnnnnnnnnnnnnnnnnnnnnnnnnnnnnnnnnnnnnnnnnnnnnnnnnnnnnnnnnnnnnnnnnnnnnnnnnnnnnnnnnnnnnnnnnnnnnnnnnnnnnnnnnnnnnnnnnnnnnnnnnnnnnnnnnnnnnnnnnnnnnnnnnnnnnnnnnnnnnnnnnnnnnnnnnnnnnnnnnnnnnnnnnnnnnnnnnnnnnnnnnnnnnnnnnnnnnnnnnnnnnnnnnnnnnnnnnnnnnnnnnnnnnnnnnnnnnnnnnnnnnnnnnnnnnnnnnnnnnnnnnnnnnnnnnnnnnnnnnnnnnnnnnnnnnnnnnnnnnnnnnnnnnnnnnnnnnnnnnnnnnnnnnnnnnnnnnnnnnnnnnnnnnnnnnnnnnnnnnnnnnnnnnnnnnnnnnnnnnnnnnnnnnnnnnnnnnnnnnnnnnnnnnnnnnnnnnnnnnnnnnnnnnnnnnnnnnnnnnnnnnnnnnnnnnnnnnnnnnnnnnnnnnnnnnnnnnnnnnnnnnnnnnnnnnnnnnnnnnnnnnnnnnnnnnnnnnnnnnnnnnnnnnnnnnnnnnnnnnnnnnnnnnnnnnnnnnnnnnnnnnnnnnnnnnnnnnnnnnnnnnnnnnnnnnnnnnnnnnnnnnnnnnnnnnnnnnnnnnnnnnnnnnnnnnnnnnnnnnnnnnnnnnnnnnnnnnnnnnnnnnnnnnnnnnnnnnnnnnnnnnnnnnnnnnnnnnnnnnnnnnnnnnnnnnnnnnnnnnnnnnnnnnnnnnnnnnnnnnnnnnnnnnnnnnnnnnnnnnnnnnnnnnnnnnnnnnnnnnnnnnnnnnnnnnnnnnnnnnnnnnnnnnnnnnnnnnnnnnnnnnnnnnnnnnnnnnnnnnnnnnnnnnnnnnnnnnnnnnnnnnnnnnnnnnnnnnnnnnnnnnnnnnnnnnnnnnnnnnnnnnnnnnnnnnnnnnnnnnnnnnnnnnnnnnnnnnnnnnnnnnnnnnnnnnnnnnnnnnnnnnnnnnnnnnnnnnnnnnnnnnnnnnnnnnnnnnnnnnnnnnnnnnnnnnnnnnnnnnnnnnnnnnnnnnnnnnnnnnnnnnnnnnnnnnnnnnnnnnnnnnnnnnnnnnnnnnnnnnnnnnnnnnnnnnnnnnnnnnnnnnnnnnnnnnnnnnnnnnnnnnnnnnnnnnnnnnnnnnnnnnnnnnnnnnnnnnnnnnnnnnnnnnnnnnnnnnnnnnnnnnnnnnnnnnnnnnnnnnnnnnnnnnnnnnnnnnnnnnnnnnnnnnnnnnnnnnnnnnnnnnnnnnnnnnnnnnnnnnnnnnnnnnnnnnnnnnnnnnnnnnnnnnnnnnnnnnnnnnnnnnnnnnnnnnnnnnnnnnnnnnnnnnnnnnnnnnnnnnnnnnnnnnnnnnnnnnnnnnnnnnnnnnnnnnnnnnnnnnnnnnnnnnnnnnnnnnnnnnnnnnnnnnnnnnnnnnnnnnnnnnnnnnnnnnnnnnnnnnnnnnnnnnnnnnnnnnnnnnnnnnnnnnnnnnnnnnnnnnnnnnnnnnnnnnnnnnnnnnnnnnnnnnnnnnnnnnnnnnnnnnnnnnnnnnnnnnnnnnnnnnnnnnnnnnnnnnnnnnnnnnnnnnnnnnnnnnnnnnnnnnnnnnnnnnnnnnnnnnnnnnnnnnnnnnnnnnnnnnnnnnnnnnnnnnnnnnnnnnnnnnnnnnnnnnnnnnnnnnnnnnnnnnnnnnnnnnnnnnnnnnnnnnnnnnnnnnnnnnnnnnnnnnnnnnnnnnnnnnnnnnnnnnnnnnnnnnnnnnnnnnnnnnnnnnnnnnnnnnnnnnnnnnnnnnnnnnnnnnnnnnnnnnnnnnnnnnnnnnnnnnnnnnnnnnnnnnnnnnnnnnnnnnnnnnnnnnnnnnnnnnnnnnnnnnnnnnnnnnnnnnnnnnnnnnnnnnnnnnnnnnnnnnnnnnnnnnnnnnnnnnnnnnnnnnnnnnnnnnnnnnnnnnnnnnnnnnnnnnnnnnnnnnnnnnnnnnnnnnnnnnnnnnnnnnnnnnnnnnnnnnnnnnnnnnnnnnnnnnnnnnnnnnnnnnnnnnnnnnnnnnnnnnnnnnnnnnnnnnnnnnnnnnnnnnnnnnnnnnnnnnnnnnnnnnnnnnnnnnnnnnnnnnnnnnnnnnnnnnnnnnnnnnnnnnnnnnnnnnnnnnnnnnnnnnnnnnnnnnnnnnnnnnnnnnnnnnnnnnnnnnnnnnnnnnnnnnnnnnnnnnnnnnnnnnnnnnnnnnnnnnnnnnnnnnnnnnnnnnnnnnnnnnnnnnnnnnnnnnnnnnnnnnnnnnnnnnnnnnnnnnnnnnnnnnnnnnnnnnnnnnnnnnnnnnnnnnnnnnnnnnnnnnnnnnnnnnnnnnnnnnnnnnnnnnnnnnnnnnnnnnnnnnnnnnnnnnnnnnnnnnnnnnnnnnnnnnnnnnnnnnnnnnnnnnnnnnnnnnnnnnnnnnnnnnnnnnnnnnnnnnnnnnnnnnnnnnnnnnnnnnnnnnnnnnnnnnnnnnnnnnnnnnnnnnnnnnnnnnnnnnnnnnnnnnnnnnnnnnnnnnnnnnnnnnnnnnnnnnnnnnnnnnnnnnnnnnnnnnnnnnnnnnnnnnnnnnnnnnnnnnnnnnnnnnnnnnnnnnnnnnnnnnnnnnnnnnnnnnnnnnnnnnnnnnnnnnnnnnnnnnnnnnnnnnnnnnnnnnnnnnnnnnnnnnnnnnnnnnnnnnnnnnnnnnnnnnnnnnnnnnnnnnnnnnnnnnnnnnnnnnnnnnnnnnnnnnnnnnnnnnnnnnnnnnnnnnnnnnnnnnnnnnnnnnnnnnnnnnnnnnnnnnnnnnnnnnnnnnnnnnnnnnnnnnnnnnnnnnnnnnnnnnnnnnnnnnnnnnnnnnnnnnnnnnnnnnnnnnnnnnnnnnnnnnnnnnnnnnnnnnnnnnnnnnnnnnnnnnnnnnnnnnnnnnnnnnnnnnnnnnnnnnnnnnnnnnnnnnnnnnnnnnnnnnnnnnnnnnnnnnnnnnnnnnnnnnnnnnnnnnnnnnnnnnnnnnnnnnnnnnnnnnnnnnnnnnnnnnnnnnnnnnnnnnnnnnnnnnnnnnnnnnnnnnnnnnnnnnnnnnnnnnnnnnnnnnnnnnnnnnnnnnnnnnnnnnnnnnnnnnnnnnnnnnnnnnnnnnnnnnnnnnnnnnnnnnnnnnnnnnnnnnnnnnnnnnnnnnnnnnnnnnnnnnnnnnnnnnnnnnnnnnnnnnnnnnnnnnnnnnnnnnnnnnnnnnnnnnnnnnnnnnnnnnnnnnnnnnnnnnnnnnnnnnnnnnnnnnnnnnnnnnnnnnnnnnnnnnnnnnnnnnnnnnnnnnnnnnnnnnnnnnnnnnnnnnnnnnnnnnnnnnnnnnnnnnnnnnnnnnnnnnnnnnnnnnnnnnnnnnnnnnnnnnnnnnnnnnnnnnnnnnnnnnnnnnnnnnnnnnnnnnnnnnnnnnnnnnnnnnnnnnnnnnnnnnnnnnnnnnnnnnnnnnnnnnnnnnnnnnnnnnnnnnnnnnnnnnnnnnnnnnnnnnnnnnnnnnnnnnnnnnnnnnnnnnnnnnnnnnnnnnnnnnnnnnnnnnnnnnnnnnnnnnnnnnnnnnnnnnnnnnnnnnnnnnnnnnnnnnnnnnnnnnnnnnnnnnnnnnnnnnnnnnnnnnnnnnnnnnnnnnnnnnnnnnnnnnnnnnnnnnnnnnnnnnnnnnnnnnnnnnnnnnnnnnnnnnnnnnnnnnnnnnnnnnnnnnnnnnnnnnnnnnnnnnnnnnnnnnnnnnnnnnnnnnnnnnnnnnnnnnnnnnnnnnnnnnnnnnnnnnnnnnnnnnnnnnnnnnnnnnnnnnnnnnnnnnnnnnnnnnnnnnnnnnnnnnnnnnnnnnnnnnnnnnnnnnnnnnnnnnnnnnnnnnnnnnnnnnnnnnnnnnnnnnnnnnnnnnnnnnnnnnnnnnnnnnnnnnnnnnnnnnnnnnnnnnnnnnnnnnnnnnnnnnnnnnnnnnnnnnnnnnnnnnnnnnnnnnnnnnnnnnnnnnnnnnnnnnnnnnnnnnnnnnnnnnnnnnnnnnnnnnnnnnnnnnnnnnnnnnnnnnnnnnnnnnnnnnnnnnnnnnnnnnnnnnnnnnnnnnnnnnnnnnnnnnnnnnnnnnnnnnnnnnnnnnnnnnnnnnnnnnnnnnnnnnnnnnnnnnnnnnnnnnnnnnnnnnnnnnnnnnnnnnnnnnnnnnnnnnnnnnnnnnnnnnnnnnnnnnnnnnnnnnnnnnnnnnnnnnnnnnnnnnnnnnnnnnnnnnnnnnnnnnnnnnnnnnnnnnnnnnnnnnnnnnnnnnnnnnnnnnnnnnnnnnnnnnnnnnnnnnnnnnnnnnnnnnnnnnnnnnnnnnnnnnnnnnnnnnnnnnnnnnnnnnnnnnnnnnnnnnnnnnnnnnnnnnnnnnnnnnnnnnnnnnnnnnnnnnnnnnnnnnnnnnnnnnnnnnnnnnnnnnnnnnnnnnnnnnnnnnnnnnnnnnnnnnnnnnnnnnnnnnnnnnnnnnnnnnnnnnnnnnnnnnnnnnnnnnnnnnnnnnnnnnnnnnnnnnnnnnnnnnnnnnnnnnnnnnnnnnnnnnnnnnnnnnnnnnnnnnnnnnnnnnnnnnnnnnnnnnnnnnnnnnnnnnnnnnnnnnnnnnnnnnnnnnnnnnnnnnnnnnnnnnnnnnnnnnnnnnnnnnnnnnnnnnnnnnnnnnnnnnnnnnnnnnnnnnnnnnnnnnnnnnnnnnnnnnnnnnnnnnnnnnnnnnnnnnnnnnnnnnnnnnnnnnnnnnnnnnnnnnnnnnnnnnnnnnnnnnnnnnnnnnnnnnnnnnnnnnnnnnnnnnnnnnnnnnnnnnnnnnnnnnnnnnnnnnnnnnnnnnnnnnnnnnnnnnnnnnnnnnnnnnnnnnnnnnnnnnnnnnnnnnnnnnnnnnnnnnnnnnnnnnnnnnnnnnnnnnnnnnnnnnnnnnnnnnnnnnnnnnnnnnnnnnnnnnnnnnnnnnnnnnnnnnnnnnnnnnnnnnnnnnnnnnnnnnnnnnnnnnnnnnnnnnnnnnnnnnnnnnnnnnnnnnnnnnnnnnnnnnnnnnnnnnnnnnnnnnnnnnnnnnnnnnnnnnnnnnnnnnnnnnnnnnnnnnnnnnnnnnnnnnnnnnnnnnnnnnnnnnnnnnnnnnnnnnnnnnnnnnnnnnnnnnnnnnnnnnnnnnnnnnnnnnnnnnnnnnnnnnnnnnnnnnnnnnnnnnnnnnnnnnnnnnnnnnnnnnnnnnnnnnnnnnnnnnnnnnnnnnnnnnnnnnnnnnnnnnnnnnnnnnnnnnnnnnnnnnnnnnnnnnnnnnnnnnnnnnnnnnnnnnnnnnnnnnnnnnnnnnnnnnnnnnnnnnnnnnnnnnnnnnnnnnnnnnnnnnnnnnnnnnnnnnnnnnnnnnnnnnnnnnnnnnnnnnnnnnnnnnnnnnnnnnnnnnnnnnnnnnnnnnnnnnnnnnnnnnnnnnnnnnnnnnnnnnnnnnnnnnnnnnnnnnnnnnnnnnnnnnnnnnnnnnnnnnnnnnnnnnnnnnnnnnnnnnnnnnnnnnnnnnnnnnnnnnnnnnnnnnnnnnnnnnnnnnnnnnnnnnnnnnnnnnnnnnnnnnnnnnnnnnnnnnnnnnnnnnnnnnnnnnnnnnnnnnnnnnnnnnnnnnnnnnnnnnnnnnnnnnnnnnnnnnnnnnnnnnnnnnnnnnnnnnnnnnnnnnnnnnnnnnnnnnnnnnnnnnnnnnnnnnnnnnnnnnnnnnnnnnnnnnnnnnnnnnnnnnnnnnnnnnnnnnnnnnnnnnnnnnnnnnnnnnnnnnnnnnnnnnnnnnnnnnnnnnnnnnnnnnnnnnnnnnnnnnnnnnnnnnnnnnnnnnnnnnnnnnnnnnnnnnnnnnnnnnnnnnnnnnnnnnnnnnnnnnnnnnnnnnnnnnnnnnnnnnnnnnnnnnnnnnnnnnnnnnnnnnnnnnnnnnnnnnnnnnnnnnnnnnnnnnnnnnnnnnnnnnnnnnnnnnnnnnnnnnnnnnnnnnnnnnnnnnnnnnnnnnnnnnnnnnnnnnnnnnnnnnnnnnnnnnnnnnnnnnnnnnnnnnnnnnnnnnnnnnnnnnnnnnnnnnnnnnnnnnnnnnnnnnnnnnnnnnnnnnnnnnnnnnnnnnnnnnnnnnnnnnnnnnnnnnnnnnnnnnnnnnnnnnnnnnnnnnnnnnnnnnnnnnnnnnnnnnnnnnnnnnnnnnnnnnnnnnnnnnnnnnnnnnnnnnnnnnnnnnnnnnnnnnnnnnnnnnnnnnnnnnnnnnnnnnnnnnnnnnnnnnnnnnnnnnnnnnnnnnnnnnnnnnnnnnnnnnnnnnnnnnnnnnnnnnnnnnnnnnnnnnnnnnnnnnnnnnnnnnnnnnnnnnnnnnnnnnnnnnnnnnnnnnnnnnnnnnnnnnnnnnnnnnnnnnnnnnnnnnnnnnnnnnnnnnnnnnnnnnnnnnnnnnnnnnnnnnnnnnnnnnnnnnnnnnnnnnnnnnnnnnnnnnnnnnnnnnnnnnnnnnnnnnnnnnnnnnnnnnnnnnnnnnnnnnnnnnnnnnnnnnnnnnnnnnnnnnnnnnnnnnnnnnnnnnnnnnnnnnnnnnnnnnnnnnnnnnnnnnnnnnnnnnnnnnnnnnnnnnnnnnnnnnnnnnnnnnnnnnnnnnnnnnnnnnnnnnnnnnnnnnnnnnnnnnnnnnnnnnnnnnnnnnnnnnnnnnnnnnnnnnnnnnnnnnnnnnnnnnnnnnnnnnnnnnnnnnnnnnnnnnnnnnnnnnnnnnnnnnnnnnnnnnnnnnnnnnnnnnnnnnnnnnnnnnnnnnnnnnnnnnnnnnnnnnnnnnnnnnnnnnnnnnnnnnnnnnnnnnnnnnnnnnnnnnnnnnnnnnnnnnnnnnnnnnnnnnnnnnnnnnnnnnnnnnnnnnnnnnnnnnnnnnnnnnnnnnnnnnnnnnnnnnnnnnnnnnnnnnnnnnnnnnnnnnnnnnnnnnnnnnnnnnnnnnnnnnnnnnnnnnnnnnnnnnnnnnnnnnnnnnnnnnnnnnnnnnnnnnnnnnnnnnnnnnnnnnnnnnnnnnnnnnnnnnnnnnnnnnnnnnnnnnnnnnnnnnnnnnnnnnnnnnnnnnnnnnnnnnnnnnnnnnnnnnnnnnnnnnnnnnnnnnnnnnnnnnnnnnnnnnnnnnnnnnnnnnnnnnnnnnnnnnnnnnnnnnnnnnnnnnnnnnnnnnnnnnnnnnnnnnnnnnnnnnnnnnnnnnnnnnnnnnnnnnnnnnnnnnnnnnnnnnnnnnnnnnnnnnnnnnnnnnnnnnnnnnnnnnnnnnnnnnnnnnnnnnnnnnnnnnnnnnnnnnnnnnnnnnnnnnnnnnnnnnnnnnnnnnnnnnnnnnnnnnnnnnnnnnnnnnnnnnnnnnnnnnnnnnnnnnnnnnnnnnnnnnnnnnnnnnnnnnnnnnnnnnnnnnnnnnnnnnnnnnnnnnnnnnnnnnnnnnnnnnnnnnnnnnnnnnnnnnnnnnnnnnnnnnnnnnnnnnnnnnnnnnnnnnnnnnnnnnnnnnnnnnnnnnnnnnnnnnnnnnnnnnnnnnnnnnnnnnnnnnnnnnnnnnnnnnnnnnnnnnnnnnnnnnnnnnnnnnnnnnnnnnnnnnnnnnnnnnnnnnnnnnnnnnnnnnnnnnnnnnnnnnnnnnnnnnnnnnnnnnnnnnnnnnnnnnnnnnnnnnnnnnnnnnnnnnnnnnnnnnnnnnnnnnnnnnnnnnnnnnnnnnnnnnnnnnnnnnnnnnnnnnnnnnnnnnnnnnnnnnnnnnnnnnnnnnnnnnnnnnnnnnnnnnnnnnnnnnnnnnnnnnnnnnnnnnnnnnnnnnnnnnnnnnnnnnnnnnnnnnnnnnnnnnnnnnnnnnnnnnnnnnnnnnnnnnnnnnnnnnnnnnnnnnnnnnnnnnnnnnnnnnnnnnnnnnnnnnnnnnnnnnnnnnnnnnnnnnnnnnnnnnnnnnnnnnnnnnnnnnnnnnnnnnnnnnnnnnnnnnnnnnnnnnnnnnnnnnnnnnnnnnnnnnnnnnnnnnnnnnnnnnnnnnnnnnnnnnnnnnnnnnnnnnnnnnnnnnnnnnnnnnnnnnnnnnnnnnnnnnnnnnnnnnnnnnnnnnnnnnnnnnnnnnnnnnnnnnnnnnnnnnnnnnnnnnnnnnnnnnnnnnnnnnnnnnnnnnnnnnnnnnnnnnnnnnnnnnnnnnnnnnnnnnnnnnnnnnnnnnnnnnnnnnnnnnnnnnnnnnnnnnnnnnnnnnnnnnnnnnnnnnnnnnnnnnnnnnnnnnnnnnnnnnnnnnnnnnnnnnnnnnnnnnnnnnnnnnnnnnnnnnnnnnnnnnnnnnnnnnnnnnnnnnnnnnnnnnnnnnnnnnnnnnnnnnnnnnnnnnnnnnnnnnnnnnnnnnnnnnnnnnnnnnnnnnnnnnnnnnnnnnnnnnnnnnnnnnnnnnnnnnnnnnnnnnnnnnnnnnnnnnnnnnnnnnnnnnnnnnnnnnnnnnnnnnnnnnnnnnnnnnnnnnnnnnnnnnnnnnnnnnnnnnnnnnnnnnnnnnnnnnnnnnnnnnnnnnnnnnnnnnnnnnnnnnnnnnnnnnnnnnnnnnnnnnnnnnnnnnnnnnnnnnnnnnnnnnnnnnnnnnnnnnnnnnnnnnnnnnnnnnnnnnnnnnnnnnnnnnnnnnnnnnnnnnnnnnnnnnnnnnnnnnnnnnnnnnnnnnnnnnnnnnnnnnnnnnnnnnnnnnnnnnnnnnnnnnnnnnnnnnnnnnnnnnnnnnnnnnnnnnnnnnnnnnnnnnnnnnnnnnnnnnnnnnnnnnnnnnnnnnnnnnnnnnnnnnnnnnnnnnnnnnnnnnnnnnnnnnnnnnnnnnnnnnnnnnnnnnnnnnnnnnnnnnnnnnnnnnnnnnnnnnnnnnnnnnnnnnnnnnnnnnnnnnnnnnnnnnnnnnnnnnnnnnnnnnnnnnnnnnnnnnnnnnnnnnnnnnnnnnnnnnnnnnnnnnnnnnnnnnnnnnnnnnnnnnnnnnnnnnnnnnnnnnnnnnnnnnnnnnnnnnnnnnnnnnnnnnnnnnnnnnnnnnnnnnnnnnnnnnnnnnnnnnnnnnnnnnnnnnnnnnnnnnnnnnnnnnnnnnnnnnnnnnnnnnnnnnnnnnnnnnnnnnnnnnnnnnnnnnnnnnnnnnnnnnnnnnnnnnnnnnnnnnnnnnnnnnnnnnnnnnnnnnnnnnnnnnnnnnnnnnnnnnnnnnnnnnnnnnnnnnnnnnnnnnnnnnnnnnnnnnnnnnnnnnnnnnnnnnnnnnnnnnnnnnnnnnnnnnnnnnnnnnnnnnnnnnnnnnnnnnnnnnnnnnnnnnnnnnnnnnnnnnnnnnnnnnnnnnnnnnnnnnnnnnnnnnnnnnnnnnnnnnnnnnnnnnnnnnnnnnnnnnnnnnnnnnnnnnnnnnnnnnnnnnnnnnnnnnnnnnnnnnnnnnnnnnnnnnnnnnnnnnnnnnnnnnnnnnnnnnnnnnnnnnnnnnnnnnnnnnnnnnnnnnnnnnnnnnnnnnnnnnnnnnnnnnnnnnnnnnnnnnnnnnnnnnnnnnnnnnnnnnnnnnnnnnnnnnnnnnnnnnnnnnnnnnnnnnnnnnnnnnnnnnnnnnnnnnnnnnnnnnnnnnnnnnnnnnnnnnnnnnnnnnnnnnnnnnnnnnnnnnnnnnnnnnnnnnnnnnnnnnnnnnnnnnnnnnnnnnnnnnnnnnnnnnnnnnnnnnnnnnnnnnnnnnnnnnnnnnnnnnnnnnnnnnnnnnnnnnnnnnnnnnnnnnnnnnnnnnnnnnnnnnnnnnnnnnnnnnnnnnnnnnnnnnnnnnnnnnnnnnnnnnnnnnnnnnnnnnnnnnnnnnnnnnnnnnnnnnnnnnnnnnnnnnnnnnnnnnnnnnnnnnnnnnnnnnnnnnnnnnnnnnnnnnnnnnnnnnnnnnnnnnnnnnnnnnnnnnnnnnnnnnnnnnnnnnnnnnnnnnnnnnnnnnnnnnnnnnnnnnnnnnnnnnnnnnnnnnnnnnnnnnnnnnnnnnnnnnnnnnnnnnnnnnnnnnnnnnnnnnnnnnnnnnnnnnnnnnnnnnnnnnnnnnnnnnnnnnnnnnnnnnnnnnnnnnnnnnnnnnnnnnnnnnnnnnnnnnnnnnnnnnnnnnnnnnnnnnnnnnnnnnnnnnnnnnnnnnnnnnnnnnnnnnnnnnnnnnnnnnnnnnnnnnnnnnnnnnnnnnnnnnnnnnnnnnnnnnnnnnnnnnnnnnnnnnnnnnnnnnnnnnnnnnnnnnnnnnnnnnnnnnnnnnnnnnnnnnnnnnnnnnnnnnnnnnnnnnnnnnnnnnnnnnnnnnnnnnnnnnnnnnnnnnnnnnnnnnnnnnnnnnnnnnnnnnnnnnnnnnnnnnnnnnnnnnnnnnnnnnnnnnnnnnnnnnnnnnnnnnnnnnnnnnnnnnnnnnnnnnnnnnnnnnnnnnnnnnnnnnnnnnnnnnnnnnnnnnnnnnnnnnnnnnnnnnnnnnnnnnnnnnnnnnnnnnnnnnnnnnnnnnnnnnnnnnnnnnnnnnnnnnnnnnnnnnnnnnnnnnnnnnnnnnnnnnnnnnnnnnnnnnnnnnnnnnnnnnnnnnnnnnnnnnnnnnnnnnnnnnnnnnnnnnnnnnnnnnnnnnnnnnnnnnnnnnnnnnnnnnnnnnnnnnnnnnnnnnnnnnnnnnnnnnnnnnnnnnnnnnnnnnnnnnnnnnnnnnnnnnnnnnnnnnnnnnnnnnnnnnnnnnnnnnnnnnnnnnnnnnnnnnnnnnnnnnnnnnnnnnnnnnnnnnnnnnnnnnnnnnnnnnnnnnnnnnnnnnnnnnnnnnnnnnnnnnnnnnnnnnnnnnnnnnnnnnnnnnnnnnnnnnnnnnnnnnnnnnnnnnnnnnnnnnnnnnnnnnnnnnnnnnnnnnnnnnnnnnnnnnnnnnnnnnnnnnnnnnnnnnnnnnnnnnnnnnnnnnnnnnnnnnnnnnnnnnnnnnnnnnnnnnnnnnnnnnnnnnnnnnnnnnnnnnnnnnnnnnnnnnnnnnnnnnnnnnnnnnnnnnnnnnnnnnnnnnnnnnnnnnnnnnnnnnnnnnnnnnnnnnnnnnnnnnnnnnnnnnnnnnnnnnnnnnnnnnnnnnnnnnnnnnnnnnnnnnnnnnnnnnnnnnnnnnnnnnnnnnnnnnnnnnnnnnnnnnnnnnnnnnnnnnnnnnnnnnnnnnnnnnnnnnnnnnnnnnnnnnnnnnnnnnnnnnnnnnnnnnnnnnnnnnnnnnnnnnnnnnnnnnnnnnnnnnnnnnnnnnnnnnnnnnnnnnnnnnnnnnnnnnnnnnnnnnnnnnnnnnnnnnnnnnnnnnnnnnnnnnnnnnnnnnnnnnnnnnnnnnnnnnnnnnnnnnnnnnnnnnnnnnnnnnnnnnnnnnnnnnnnnnnnnnnnnnnnnnnnnnnnnnnnnnnnnnnnnnnnnnnnnnnnnnnnnnnnnnnnnnnnnnnnnnnnnnnnnnnnnnnnnnnnnnnnnnnnnnnnnnnnnnnnnnnnnnnnnnnnnnnnnnnnnnnnnnnnnnnnnnnnnnnnnnnnnnnnnnnnnnnnnnnnnnnnnnnnnnnnnnnnnnnnnnnnnnnnnnnnnnnnnnnnnnnnnnnnnnnnnnnnnnnnnnnnnnnnnnnnnnnnnnnnnnnnnnnnnnnnnnnnnnnnnnnnnnnnnnnnnnnnnnnnnnnnnnnnnnnnnnnnnnnnnnnnnnnnnnnnnnnnnnnnnnnnnnnnnnnnnnnnnnnnnnnnnnnnnnnnnnnnnnnnnnnnnnnnnnnnnnnnnnnnnnnnnnnnnnnnnnnnnnnnnnnnnnnnnnnnnnnnnnnnnnnnnnnnnnnnnnnnnnnnnnnnnnnnnnnnnnnnnnnnnnnnnnnnnnnnnnnnnnnnnnnnnnnnnnnnnnnnnnnnnnnnnnnnnnnnnnnnnnnnnnnnnnnnnnnnnnnnnnnnnnnnnnnnnnnnnnnnnnnnnnnnnnnnnnnnnnnnnnnnnnnnnnnnnnnnnnnnnnnnnnnnnnnnnnnnnnnnnnnnnnnnnnnnnnnnnnnnnnnnnnnnnnnnnnnnnnnnnnnnnnnnnnnnnnnnnnnnnnnnnnnnnnnnnnnnnnnnnnnnnnnnnnnnnnnnnnnnnnnnnnnnnnnnnnnnnnnnnnnnnnnnnnnnnnnnnnnnnnnnnnnnnnnnnnnnnnnnnnnnnnnnnnnnnnnnnnnnnnnnnnnnnnnnnnnnnnnnnnnnnnnnnnnnnnnnnnnnnnnnnnnnnnnnnnnnnnnnnnnnnnnnnnnnnnnnnnnnnnnnnnnnnnnnnnnnnnnnnnnnnnnnnnnnnnnnnnnnnnnnnnnnnnnnnnnnnnnnnnnnnnnnnnnnnnnnnnnnnnnnnnnnnnnnnnnnnnnnnnnnnnnnnnnnnnnnnnnnnnnnnnnnnnnnnnnnnnnnnnnnnnnnnnnnnnnnnnnnnnnnnnnnnnnnnnnnnnnnnnnnnnnnnnnnnnnnnnnnnnnnnnnnnnnnnnnnnnnnnnnnnnnnnnnnnnnnnnnnnnnnnnnnnnnnnnnnnnnnnnnnnnnnnnnnnnnnnnnnnnnnnnnnnnnnnnnnnnnnnnnnnnnnnnnnnnnnnnnnnnnnnnnnnnnnnnnnnnnnnnnnnnnnnnnnnnnnnnnnnnnnnnnnnnnnnnnnnnnnnnnnnnnnnnnnnnnnnnnnnnnnnnnnnnnnnnnnnnnnnnnnnnnnnnnnnnnnnnnnnnnnnnnnnnnnnnnnnnnnnnnnnnnnnnnnnnnnnnnnnnnnnnnnnnnnnnnnnnnnnnnnnnnnnnnnnnnnnnnnnnnnnnnnnnnnnnnnnnnnnnnnnnnnnnnnnnnnnnnnnnnnnnnnnnnnnnnnnnnnnnnnnnnnnnnnnnnnnnnnnnnnnnnnnnnnnnnnnnnnnnnnnnnnnnnnnnnnnnnnnnnnnnnnnnnnnnnnnnnnnnnnnnnnnnnnnnnnnnnnnnnnnnnnnnnnnnnnnnnnnnnnnnnnnnnnnnnnnnnnnnnnnnnnnnnnnnnnnnnnnnnnnnnnnnnnnnnnnnnnnnnnnnnnnnnnnnnnnnnnnnnnnnnnnnnnnnnnnnnnnnnnnnnnnnnnnnnnnnnnnnnnnnnnnnnnnnnnnnnnnnnnnnnnnnnnnnnnnnnnnnnnnnnnnnnnnnnnnnnnnnnnnnnnnnnnnnnnnnnnnnnnnnnnnnnnnnnnnnnnnnnnnnnnnnnnnnnnnnnnnnnnnnnnnnnnnnnnnnnnnnnnnnnnnnnnnnnnnnnnnnnnnnnnnnnnnnnnnnnnnnnnnnnnnnnnnnnnnnnnnnnnnnnnnnnnnnnnnnnnnnnnnnnnnnnnnnnnnnnnnnnnnnnnnnnnnnnnnnnnnnnnnnnnnnnnnnnnnnnnnnnnnnnnnnnnnnnnnnnnnnnnnnnnnnnnnnnnnnnnnnnnnnnnnnnnnnnnnnnnnnnnnnnnnnnnnnnnnnnnnnnnnnnnnnnnnnnnnnnnnnnnnnnnnnnnnnnnnnnnnnnnnnnnnnnnnnnnnnnnnnnnnnnnnnnnnnnnnnnnnnnnnnnnnnnnnnnnnnnnnnnnnnnnnnnnnnnnnnnnnnnnnnnnnnnnnnnnnnnnnnnnnnnnnnnnnnnnnnnnnnnnnnnnnnnnnnnnnnnnnnnnnnnnnnnnnnnnnnnnnnnnnnnnnnnnnnnnnnnnnnnnnnnnnnnnnnnnnnnnnnnnnnnnnnnnnnnnnnnnnnnnnnnnnnnnnnnnnnnnnnnnnnnnnnnnnnnnnnnnnnnnnnnnnnnnnnnnnnnnnnnnnnnnnnnnnnnnnnnnnnnnnnnnnnnnnnnnnnnnnnnnnnnnnnnnnnnnnnnnnnnnnnnnnnnnnnnnnnnnnnnnnnnnnnnnnnnnnnnnnnnnnnnnnnnnnnnnnnnnnnnnnnnnnnnnnnnnnnnnnnnnnnnnnnnnnnnnnnnnnnnnnnnnnnnnnnnnnnnnnnnnnnnnnnnnnnnnnnnnnnnnnnnnnnnnnnnnnnnnnnnnnnnnnnnnnnnnnnnnnnnnnnnnnnnnnnnnnnnnnnnnnnnnnnnnnnnnnnnnnnnnnnnnnnnnnnnnnnnnnnnnnnnnnnnnnnnnnnnnnnnnnnnnnnnnnnnnnnnnnnnnnnnnnnnnnnnnnnnnnnnnnnnnnnnnnnnnnnnnnnnnnnnnnnnnnnnnnnnnnnnnnnnnnnnnnnnnnnnnnnnnnnnnnnnnnnnnnnnnnnnnnnnnnnnnnnnnnnnnnnnnnnnnnnnnnnnnnnnnnnnnnnnnnnnnnnnnnnnnnnnnnnnnnnnnnnnnnnnnnnnnnnnnnnnnnnnnnnnnnnnnnnnnnnnnnnnnnnnnnnnnnnnnnnnnnnnnnnnnnnnnnnnnnnnnnnnnnnnnnnnnnnnnnnnnnnnnnnnnnnnnnnnnnnnnnnnnnnnnnnnnnnnnnnnnnnnnnnnnnnnnnnnnnnnnnnnnnnnnnnnnnnnnnnnnnnnnnnnnnnnnnnnnnnnnnnnnnnnnnnnnnnnnnnnnnnnnnnnnnnnnnnnnnnnnnnnnnnnnnnnnnnnnnnnnnnnnnnnnnnnnnnnnnnnnnnnnnnnnnnnnnnnnnnnnnnnnnnnnnnnnnnnnnnnnnnnnnnnnnnnnnnnnnnnnnnnnnnnnnnnnnnnnnnnnnnnnnnnnnnnnnnnnnnnnnnnnnnnnnnnnnnnnnnnnnnnnnnnnnnnnnnnnnnnnnnnnnnnnnnnnnnnnnnnnnnnnnnnnnnnnnnnnnnnnnnnnnnnnnnnnnnnnnnnnnnnnnnnnnnnnnnnnnnnnnnnnnnnnnnnnnnnnnnnnnnnnnnnnnnnnnnnnnnnnnnnnnnnnnnnnnnnnnnnnnnnnnnnnnnnnnnnnnnnnnnnnnnnnnnnnnnnnnnnnnnnnnnnnnnnnnnnnnnnnnnnnnnnnnnnnnnnnnnnnnnnnnnnnnnnnnnnnnnnnnnnnnnnnnnnnnnnnnnnnnnnnnnnnnnnnnnnnnnnnnnnnnnnnnnnnnnnnnnnnnnnnnnnnnnnnnnnnnnnnnnnnnnnnnnnnnnnnnnnnnnnnnnnnnnnnnnnnnnnnnnnnnnnnnnnnnnnnnnnnnnnnnnnnnnnnnnnnnnnnnnnnnnnnnnnnnnnnnnnnnnnnnnnnnnnnnnnnnnnnnnnnnnnnnnnnnnnnnnnnnnnnnnnnnnnnnnnnnnnnnnnnnnnnnnnnnnnnnnnnnnnnnnnnnnnnnnnnnnnnnnnnnnnnnnnnnnnnnnnnnnnnnnnnnnnnnnnnnnnnnnnnnnnnnnnnnnnnnnnnnnnnnnnnnnnnnnnnnnnnnnnnnnnnnnnnnnnnnnnnnnnnnnnnnnnnnnnnnnnnnnnnnnnnnnnnnnnnnnnnnnnnnnnnnnnnnnnnnnnnnnnnnnnnnnnnnnnnnnnnnnnnnnnnnnnnnnnnnnnnnnnnnnnnnnnnnnnnnnnnnnnnnnnnnnnnnnnnnnnnnnnnnnnnnnnnnnnnnnnnnnnnnnnnnnnnnnnnnnnnnnnnnnnnnnnnnnnnnnnnnnnnnnnnnnnnnnnnnnnnnnnnnnnnnnnnnnnnnnnnnnnnnnnnnnnnnnnnnnnnnnnnnnnnnnnnnnnnnnnnnnnnnnnnnnnnnnnnnnnnnnnnnnnnnnnnnnnnnnnnnnnnnnnnnnnnnnnnnnnnnnnnnnnnnnnnnnnnnnnnnnnnnnnnnnnnnnnnnnnnnnnnnnnnnnnnnnnnnnnnnnnnnnnnnnnnnnnnnnnnnnnnnnnnnnnnnnnnnnnnnnnnnnnnnnnnnnnnnnnnnnnnnnnnnnnnnnnnnnnnnnnnnnnnnnnnnnnnnnnnnnnnnnnnnnnnnnnnnnnnnnnnnnnnnnnnnnnnnnnnnnnnnnnnnnnnnnnnnnnnnnnnnnnnnnnnnnnnnnnnnnnnnnnnnnnnnnnnnnnnnnnnnnnnnnnnnnnnnnnnnnnnnnnnnnnnnnnnnnnnnnnnnnnnnnnnnnnnnnnnnnnnnnnnnnnnnnnnnnnnnnnnnnnnnnnnnnnnnnnnnnnnnnnnnnnnnnnnnnnnnnnnnnnnnnnnnnnnnnnnnnnnnnnnnnnnnnnnnnnnnnnnnnnnnnnnnnnnnnnnnnnnnnnnnnnnnnnnnnnnnnnnnnnnnnnnnnnnnnnnnnnnnnnnnnnnnnnnnnnnnnnnnnnnnnnnnnnnnnnnnnnnnnnnnnnnnnnnnnnnnnnnnnnnnnnnnnnnnnnnnnnnnnnnnnnnnnnnnnnnnnnnnnnnnnnnnnnnnnnnnnnnnnnnnnnnnnnnnnnnnnnnnnnnnnnnnnnnnnnnnnnnnnnnnnnnnnnnnnnnnnnnnnnnnnnnnnnnnnnnnnnnnnnnnnnnnnnnnnnnnnnnnnnnnnnnnnnnnnnnnnnnnnnnnnnnnnnnnnnnnnnnnnnnnnnnnnnnnnnnnnnnnnnnnnnnnnnnnnnnnnnnnnnnnnnnnnnnnnnnnnnnnnnnnnnnnnnnnnnnnnnnnnnnnnnnnnnnnnnnnnnnnnnnnnnnnnnnnnnnnnnnnnnnnnnnnnnnnnnnnnnnnnnnnnnnnnnnnnnnnnnnnnnnnnnnnnnnnnnnnnnnnnnnnnnnnnnnnnnnnnnnnnnnnnnnnnnnnnnnnnnnnnnnnnnnnnnnnnnnnnnnnnnnnnnnnnnnnnnnnnnnnnnnnnnnnnnnnnnnnnnnnnnnnnnnnnnnnnnnnnnnnnnnnnnnnnnnnnnnnnnnnnnnnnnnnnnnnnnnnnnnnnnnnnnnnnnnnnnnnnnnnnnnnnnnnnnnnnnnnnnnnnnnnnnnnnnnnnnnnnnnnnnnnnnnnnnnnnnnnnnnnnnnnnnnnnnnnnnnnnnnnnnnnnnnnnnnnnnnnnnnnnnnnnnnnnnnnnnnnnnnnnnnnnnnnnnnnnnnnnnnnnnnnnnnnnnnnnnnnnnnnnnnnnnnnnnnnnnnnnnnnnnnnnnnnnnnnnnnnnnnnnnnnnnnnnnnnnnnnnnnnnnnnnnnnnnnnnnnnnnnnnnnnnnnnnnnnnnnnnnnnnnnnnnnnnnnnnnnnnnnnnnnnnnnnnnnnnnnnnnnnnnnnnnnnnnnnnnnnnnnnnnnnnnnnnnnnnnnnnnnnnnnnnnnnnnnnnnnnnnnnnnnnnnnnnnnnnnnnnnnnnnnnnnnnnnnnnnnnnnnnnnnnnnnnnnnnnnnnnnnnnnnnnnnnnnnnnnnnnnnnnnnnnnnnnnnnnnnnnnnnnnnnnnnnnnnnnnnnnnnnnnnnnnnnnnnnnnnnnnnnnnnnnnnnnnnnnnnnnnnnnnnnnnnnnnnnnnnnnnnnnnnnnnnnnnnnnnnnnnnnnnnnnnnnnnnnnnnnnnnnnnnnnnnnnnnnnnnnnnnnnnnnnnnnnnnnnnnnnnnnnnnnnnnnnnnnnnnnnnnnnnnnnnnnnnnnnnnnnnnnnnnnnnnnnnnnnnnnnnnnnnnnnnnnnnnnnnnnnnnnnnnnnnnnnnnnnnnnnnnnnnnnnnnnnnnnnnnnnnnnnnnnnnnnnnnnnnnnnnnnnnnnnnnnnnnnnnnnnnnnnnnnnnnnnnnnnnnnnnnnnnnnnnnnnnnnnnnnnnnnnnnnnnnnnnnnnnnnnnnnnnnnnnnnnnnnnnnnnnnnnnnnnnnnnnnnnnnnnnnnnnnnnnnnnnnnnnnnnnnnnnnnnnnnnnnnnnnnnnnnnnnnnnnnnnnnnnnnnnnnnnnnnnnnnnnnnnnnnnnnnnnnnnnnnnnnnnnnnnnnnnnnnnnnnnnnnnnnnnnnnnnnnnnnnnnnnnnnnnnnnnnnnnnnnnnnnnnnnnnnnnnnnnnnnnnnnnnnnnnnnnnnnnnnnnnnnnnnnnnnnnnnnnnnnnnnnnnnnnnnnnnnnnnnnnnnnnnnnnnnnnnnnnnnnnnnnnnnnnnnnnnnnnnnnnnnnnnnnnnnnnnnnnnnnnnnnnnnnnnnnnnnnnnnnnnnnnnnnnnnnnnnnnnnnnnnnnnnnnnnnnnnnnnnnnnnnnnnnnnnnnnnnnnnnnnnnnnnnnnnnnnnnnnnnnnnnnnnnnnnnnnnnnnnnnnnnnnnnnnnnnnnnnnnnnnnnnnnnnnnnnnnnnnnnnnnnnnnnnnnnnnnnnnnnnnnnnnnnnnnnnnnnnnnnnnnnnnnnnnnnnnnnnnnnnnnnnnnnnnnnnnnnnnnnnnnnnnnnnnnnnnnnnnnnnnnnnnnnnnnnnnnnnnnnnnnnnnnnnnnnnnnnnnnnnnnnnnnnnnnnnnnnnnnnnnnnnnnnnnnnnnnnnnnnnnnnnnnnnnnnnnnnnnnnnnnnnnnnnnnnnnnnnnnnnnnnnnnnnnnnnnnnnnnnnnnnnnnnnnnnnnnnnnnnnnnnnnnnnnnnnnnnnnnnnnnnnnnnnnnnnnnnnnnnnnnnnnnnnnnnnnnnnnnnnnnnnnnnnnnnnnnnnnnnnnnnnnnnnnnnnnnnnnnnnnnnnnnnnnnnnnnnnnnnnnnnnnnnnnnnnnnnnnnnnnnnnnnnnnnnnnnnnnnnnnnnnnnnnnnnnnnnnnnnnnnnnnnnnnnnnnnnnnnnnnnnnnnnnnnnnnnnnnnnnnnnnnnnnnnnnnnnnnnnnnnnnnnnnnnnnnnnnnnnnnnnnnnnnnnnnnnnnnnnnnnnnnnnnnnnnnnnnnnnnnnnnnnnnnnnnnnnnnnnnnnnnnnnnnnnnnnnnnnnnnnnnnnnnnnnnnnnnnnnnnnnnnnnnnnnnnnnnnnnnnnnnnnnnnnnnnnnnnnnnnnnnnnnnnnnnnnnnnnnnnnnnnnnnnnnnnnnnnnnnnnnnnnnnnnnnnnnnnnnnnnnnnnnnnnnnnnnnnnnnnnnnnnnnnnnnnnnnnnnnnnnnnnnnnnnnnnnnnnnnnnnnnnnnnnnnnnnnnnnnnnnnnnnnnnnnnnnnnnnnnnnnnnnnnnnnnnnnnnnnnnnnnnnnnnnnnnnnnnnnnnnnnnnnnnnnnnnnnnnnnnnnnnnnnnnnnnnnnnnnnnnnnnnnnnnnnnnnnnnnnnnnnnnnnnnnnnnnnnnnnnnnnnnnnnnnnnnnnnnnnnnnnnnnnnnnnnnnnnnnnnnnnnnnnnnnnnnnnnnnnnnnnnnnnnnnnnnnnnnnnnnnnnnnnnnnnnnnnnnnnnnnnnnnnnnnnnnnnnnnnnnnnnnnnnnnnnnnnnnnnnnnnnnnnnnnnnnnnnnnnnnnnnnnnnnnnnnnnnnnnnnnnnnnnnnnnnnnnnnnnnnnnnnnnnnnnnnnnnnnnnnnnnnnnnnnnnnnnnnnnnnnnnnnnnnnnnnnnnnnnnnnnnnnnnnnnnnnnnnnnnnnnnnnnnnnnnnnnnnnnnnnnnnnnnnnnnnnnnnnnnnnnnnnnnnnnnnnnnnnnnnnnnnnnnnnnnnnnnnnnnnnnnnnnnnnnnnnnnnnnnnnnnnnnnnnnnnnnnnnnnnnnnnnnnnnnnnnnnnnnnnnnnnnnnnnnnnnnnnnnnnnnnnnnnnnnnnnnnnnnnnnnnnnnnnnnnnnnnnnnnnnnnnnnnnnnnnnnnnnnnnnnnnnnnnnnnnnnnnnnnnnnnnnnnnnnnnnnnnnnnnnnnnnnnnnnnnnnnnnnnnnnnnnnnnnnnnnnnnnnnnnnnnnnnnnnnnnnnnnnnnnnnnnnnnnnnnnnnnnnnnnnnnnnnnnnnnnnnnnnnnnnnnnnnnnnnnnnnnnnnnnnnnnnnnnnnnnnnnnnnnnnnnnnnnnnnnnnnnnnnnnnnnnnnnnnnnnnnnnnnnnnnnnnnnnnnnnnnnnnnnnnnnnnnnnnnnnnnnnnnnnnnnnnnnnnnnnnnnnnnnnnnnnnnnnnnnnnnnnnnnnnnnnnnnnnnnnnnnnnnnnnnnnnnnnnnnnnnnnnnnnnnnnnnnnnnnnnnnnnnnnnnnnnnnnnnnnnnnnnnnnnnnnnnnnnnnnnnnnnnnnnnnnnnnnnnnnnnnnnnnnnnnnnnnnnnnnnnnnnnnnnnnnnnnnnnnnnnnnnnnnnnnnnnnnnnnnnnnnnnnnnnnnnnnnnnnnnnnnnnnnnnnnnnnnnnnnnnnnnnnnnnnnnnnnnnnnnnnnnnnnnnnnnnnnnnnnnnnnnnnnnnnnnnnnnnnnnnnnnnnnnnnnnnnnnnnnnnnnnnnnnnnnnnnnnnnnnnnnnnnnnnnnnnnnnnnnnnnnnnnnnnnnnnnnnnnnnnnnnnnnnnnnnnnnnnnnnnnnnnnnnnnnnnnnnnnnnnnnnnnnnnnnnnnnnnnnnnnnnnnnnnnnnnnnnnnnnnnnnnnnnnnnnnnnnnnnnnnnnnnnnnnnnnnnnnnnnnnnnnnnnnnnnnnnnnnnnnnnnnnnnnnnnnnnnnnnnnnnnnnnnnnnnnnnnnnnnnnnnnnnnnnnnnnnnnnnnnnnnnnnnnnnnnnnnnnnnnnnnnnnnnnnnnnnnnnnnnnnnnnnnnnnnnnnnnnnnnnnnnnnnnnnnnnnnnnnnnnnnnnnnnnnnnnnnnnnnnnnnnnnnnnnnnnnnnnnnnnnnnnnnnnnnnnnnnnnnnnnnnnnnnnnnnnnnnnnnnnnnnnnnnnnnnnnnnnnnnnnnnnnnnnnnnnnnnnnnnnnnnnnnnnnnnnnnnnnnnnnnnnnnnnnnnnnnnnnnnnnnnnnnnnnnnnnnnnnnnnnnnnnnnnnnnnnnnnnnnnnnnnnnnnnnnnnnnnnnnnnnnnnnnnnnnnnnnnnnnnnnnnnnnnnnnnnnnnnnnnnnnnnnnnnnnnnnnnnnnnnnnnnnnnnnnnnnnnnnnnnnnnnnnnnnnnnnnnnnnnnnnnnnnnnnnnnnnnnnnnnnnnnnnnnnnnnnnnnnnnnnnnnnnnnnnnnnnnnnnnnnnnnnnnnnnnnnnnnnnnnnnnnnnnnnnnnnnnnnnnnnnnnnnnnnnnnnnnnnnnnnnnnnnnnnnnnnnnnnnnnnnnnnnnnnnnnnnnnnnnnnnnnnnnnnnnnnnnnnnnnnnnnnnnnnnnnnnnnnnnnnnnnnnnnnnnnnnnnnnnnnnnnnnnnnnnnnnnnnnnnnnnnnnnnnnnnnnnnnnnnnnnnnnnnnnnnnnnnnnnnnnnnnnnnnnnnnnnnnnnnnnnnnnnnnnnnnnnnnnnnnnnnnnnnnnnnnnnnnnnnnnnnnnnnnnnnnnnnnnnnnnnnnnnnnnnnnnnnnnnnnnnnnnnnnnnnnnnnnnnnnnnnnnnnnnnnnnnnnnnnnnnnnnnnnnnnnnnnnnnnnnnnnnnnnnnnnnnnnnnnnnnnnnnnnnnnnnnnnnnnnnnnnnnnnnnnnnnnnnnnnnnnnnnnnnnnnnnnnnnnnnnnnnnnnnnnnnnnnnnnnnnnnnnnnnnnnnnnnnnnnnnnnnnnnnnnnnnnnnnnnnnnnnnnnnnnnnnnnnnnnnnnnnnnnnnnnnnnnnnnnnnnnnnnnnnnnnnnnnnnnnnnnnnnnnnnnnnnnnnnnnnnnnnnnnnnnnnnnnnnnnnnnnnnnnnnnnnnnnnnnnnnnnnnnnnnnnnnnnnnnnnnnnnnnnnnnnnnnnnnnnnnnnnnnnnnnnnnnnnnnnnnnnnnnnnnnnnnnnnnnnnnnnnnnnnnnnnnnnnnnnnnnnnnnnnnnnnnnnnnnnnnnnnnnnnnnnnnnnnnnnnnnnnnnnnnnnnnnnnnnnnnnnnnnnnnnnnnnnnnnnnnnnnnnnnnnnnnnnnnnnnnnnnnnnnnnnnnnnnnnnnnnnnnnnnnnnnnnnnnnnnnnnnnnnnnnnnnnnnnnnnnnnnnnnnnnnnnnnnnnnnnnnnnnnnnnnnnnnnnnnnnnnnnnnnnnnnnnnnnnnnnnnnnnnnnnnnnnnnnnnnnnnnnnnnnnnnnnnnnnnnnnnnnnnnnnnnnnnnnnnnnnnnnnnnnnnnnnnnnnnnnnnnnnnnnnnnnnnnnnnnnnnnnnnnnnnnnnnnnnnnnnnnnnnnnnnnnnnnnnnnnnnnnnnnnnnnnnnnnnnnnnnnnnnnnnnnnnnnnnnnnnnnnnnnnnnnnnnnnnnnnnnnnnnnnnnnnnnnnnnnnnnnnnnnnnnnnnnnnnnnnnnnnnnnnnnnnnnnnnnnnnnnnnnnnnnnnnnnnnnnnnnnnnnnnnnnnnnnnnnnnnnnnnnnnnnnnnnnnnnnnnnnnnnnnnnnnnnnnnnnnnnnnnnnnnnnnnnnnnnnnnnnnnnnnnnnnnnnnnnnnnnnnnnnnnnnnnnnnnnnnnnnnnnnnnnnnnnnnnnnnnnnnnnnnnnnnnnnnnnnnnnnnnnnnnnnnnnnnnnnnnnnnnnnnnnnnnnnnnnnnnnnnnnnnnnnnnnnnnnnnnnnnnnnnnnnnnnnnnnnnnnnnnnnnnnnnnnnnnnnnnnnnnnnnnnnnnnnnnnnnnnnnnnnnnnnnnnnnnnnnnnnnnnnnnnnnnnnnnnnnnnnnnnnnnnnnnnnnnnnnnnnnnnnnnnnnnnnnnnnnnnnnnnnnnnnnnnnnnnnnnnnnnnnnnnnnnnnnnnnnnnnnnnnnnnnnnnnnnnnnnnnnnnnnnnnnnnnnnnnnnnnnnnnnnnnnnnnnnnnnnnnnnnnnnnnnnnnnnnnnnnnnnnnnnnnnnnnnnnnnnnnnnnnnnnnnnnnnnnnnnnnnnnnnnnnnnnnnnnnnnnnnnnnnnnnnnnnnnnnnnnnnnnnnnnnnnnnnnnnnnnnnnnnnnnnnnnnnnnnnnnnnnnnnnnnnnnnnnnnnnnnnnnnnnnnnnnnnnnnnnnnnnnnnnnnnnnnnnnnnnnnnnnnnnnnnnnnnnnnnnnnnnnnnnnnnnnnnnnnnnnnnnnnnnnnnnnnnnnnnnnnnnnnnnnnnnnnnnnnnnnnnnnnnnnnnnnnnnnnnnnnnnnnnnnnnnnnnnnnnnnnnnnnnnnnnnnnnnnnnnnnnnnnnnnnnnnnnnnnnnnnnnnnnnnnnnnnnnnnnnnnnnnnnnnnnnnnnnnnnnnnnnnnnnnnnnnnnnnnnnnnnnnnnnnnnnnnnnnnnnnnnnnnnnnnnnnnnnnnnnnnnnnnnnnnnnnnnnnnnnnnnnnnnnnnnnnnnnnnnnnnnnnnnnnnnnnnnnnnnnnnnnnnnnnnnnnnnnnnnnnnnnnnnnnnnnnnnnnnnnnnnnnnnnnnnnnnnnnnnnnnnnnnnnnnnnnnnnnnnnnnnnnnnnnnnnnnnnnnnnnnnnnnnnnnnnnnnnnnnnnnnnnnnnnnnnnnnnnnnnnnnnnnnnnnnnnnnnnnnnnnnnnnnnnnnnnnnnnnnnnnnnnnnnnnnnnnnnnnnnnnnnnnnnnnnnnnnnnnnnnnnnnnnnnnnnnnnnnnnnnnnnnnnnnnnnnnnnnnnnnnnnnnnnnnnnnnnnnnnnnnnnnnnnnnnnnnnnnnnnnnnnnnnnnnnnnnnnnnnnnnnnnnnnnnnnnnnnnnnnnnnnnnnnnnnnnnnnnnnnnnnnnnnnnnnnnnnnnnnnnnnnnnnnnnnnnnnnnnnnnnnnnnnnnnnnnnnnnnnnnnnnnnnnnnnnnnnnnnnnnnnnnnnnnnnnnnnnnnnnnnnnnnnnnnnnnnnnnnnnnnnnnnnnnnnnnnnnnnnnnnnnnnnnnnnnnnnnnnnnnnnnnnnnnnnnnnnnnnnnnnnnnnnnnnnnnnnnnnnnnnnnnnnnnnnnnnnnnnnnnnnnnnnnnnnnnnnnnnnnnnnnnnnnnnnnnnnnnnnnnnnnnnnnnnnnnnnnnnnnnnnnnnnnnnnnnnnnnnnnnnnnnnnnnnnnnnnnnnnnnnnnnnnnnnnnnnnnnnnnnnnnnnnnnnnnnnnnnnnnnnnnnnnnnnnnnnnnnnnnnnnnnnnnnnnnnnnnnnnnnnnnnnnnnnnnnnnnnnnnnnnnnnnnnnnnnnnnnnnnnnnnnnnnnnnnnnnnnnnnnnnnnnnnnnnnnnnnnnnnnnnnnnnnnnnnnnnnnnnnnnnnnnnnnnnnnnnnnnnnnnnnnnnnnnnnnnnnnnnnnnnnnnnnnnnnnnnnnnnnnnnnnnnnnnnnnnnnnnnnnnnnnnnnnnnnnnnnnnnnnnnnnnnnnnnnnnnnnnnnnnnnnnnnnnnnnnnnnnnnnnnnnnnnnnnnnnnnnnnnnnnnnnnnnnnnnnnnnnnnnnnnnnnnnnnnnnnnnnnnnnnnnnnnnnnnnnnnnnnnnnnnnnnnnnnnnnnnnnnnnnnnnnnnnnnnnnnnnnnnnnnnnnnnnnnnnnnnnnnnnnnnnnnnnnnnnnnnnnnnnnnnnnnnnnnnnnnnnnnnnnnnnnnnnnnnnnnnnnnnnnnnnnnnnnnnnnnnnnnnnnnnnnnnnnnnnnnnnnnnnnnnnnnnnnnnnnnnnnnnnnnnnnnnnnnnnnnnnnnnnnnnnnnnnnnnnnnnnnnnnnnnnnnnnnnnnnnnnnnnnnnnnnnnnnnnnnnnnnnnnnnnnnnnnnnnnnnnnnnnnnnnnnnnnnnnnnnnnnnnnnnnnnnnnnnnnnnnnnnnnnnnnnnnnnnnnnnnnnnnnnnnnnnnnnnnnnnnnnnnnnnnnnnnnnnnnnnnnnnnnnnnnnnnnnnnnnnnnnnnnnnnnnnnnnnnnnnnnnnnnnnnnnnnnnnnnnnnnnnnnnnnnnnnnnnnnnnnnnnnnnnnnnnnnnnnnnnnnnnnnnnnnnnnnnnnnnnnnnnnnnnnnnnnnnnnnnnnnnnnnnnnnnnnnnnnnnnnnnnnnnnnnnnnnnnnnnnnnnnnnnnnnnnnnnnnnnnnnnnnnnnnnnnnnnnnnnnnnnnnnnnnnnnnnnnnnnnnnnnnnnnnnnnnnnnnnnnnnnnnnnnnnnnnnnnnnnnnnnnnnnnnnnnnnnnnnnnnnnnnnnnnnnnnnnnnnnnnnnnnnnnnnnnnnnnnnnnnnnnnnnnnnnnnnnnnnnnnnnnnnnnnnnnnnnnnnnnnnnnnnnnnnnnnnnnnnnnnnnnnnnnnnnnnnnnnnnnnnnnnnnnnnnnnnnnnnnnnnnnnnnnnnnnnnnnnnnnnnnnnnnnnnnnnnnnnnnnnnnnnnnnnnnnnnnnnnnnnnnnnnnnnnnnnnnnnnnnnnnnnnnnnnnnnnnnnnnnnnnnnnnnnnnnnnnnnnnnnnnnnnnnnnnnnnnnnnnnnnnnnnnnnnnnnnnnnnnnnnnnnnnnnnnnnnnnnnnnnnnnnnnnnnnnnnnnnnnnnnnnnnnnnnnnnnnnnnnnnnnnnnnnnnnnnnnnnnnnnnnnnnnnnnnnnnnnnnnnnnnnnnnnnnnnnnnnnnnnnnnnnnnnnnnnnnnnnnnnnnnnnnnnnnnnnnnnnnnnnnnnnnnnnnnnnnnnnnnnnnnnnnnnnnnnnnnnnnnnnnnnnnnnnnnnnnnnnnnnnnnnnnnnnnnnnnnnnnnnnnnnnnnnnnnnnnnnnnnnnnnnnnnnnnnnnnnnnnnnnnnnnnnnnnnnnnnnnnnnnnnnnnnnnnnnnnnnnnnnnnnnnnnnnnnnnnnnnnnnnnnnnnnnnnnnnnnnnnnnnnnnnnnnnnnnnnnnnnnnnnnnnnnnnnnnnnnnnnnnnnnnnnnnnnnnnnnnnnnnnnnnnnnnnnnnnnnnnnnnnnnnnnnnnnnnnnnnnnnnnnnnnnnnnnnnnnnnnnnnnnnnnnnnnnnnnnnnnnnnnnnnnnnnnnnnnnnnnnnnnnnnnnnnnnnnnnnnnnnnnnnnnnnnnnnnnnnnnnnnnnnnnnnnnnnnnnnnnnnnnnnnnnnnnnnnnnnnnnnnnnnnnnnnnnnnnnnnnnnnnnnnnnnnnnnnnnnnnnnnnnnnnnnnnnnnnnnnnnnnnnnnnnnnnnnnnnnnnnnnnnnnnnnnnnnnnnnnnnnnnnnnnnnnnnnnnnnnnnnnnnnnnnnnnnnnnnnnnnnnnnnnnnnnnnnnnnnnnnnnnnnnnnnnnnnnnnnnnnnnnnnnnnnnnnnnnnnnnnnnnnnnnnnnnnnnnnnnnnnnnnnnnnnnnnnnnnnnnnnnnnnnnnnnnnnnnnnnnnnnnnnnnnnnnnnnnnnnnnnnnnnnnnnnnnnnnnnnnnnnnnnnnnnnnnnnnnnnnnnnnnnnnnnnnnnnnnnnnnnnnnnnnnnnnnnnnnnnnnnnnnnnnnnnnnnnnnnnnnnnnnnnnnnnnnnnnnnnnnnnnnnnnnnnnnnnnnnnnnnnnnnnnnnnnnnnnnnnnnnnnnnnnnnnnnnnnnnnnnnnnnnnnnnnnnnnnnnnnnnnnnnnnnnnnnnnnnnnnnnnnnnnnnnnnnnnnnnnnnnnnnnnnnnnnnnnnnnnnnnnnnnnnnnnnnnnnnnnnnnnnnnnnnnnnnnnnnnnnnnnnnnnnnnnnnnnnnnnnnnnnnnnnnnnnnnnnnnnnnnnnnnnnnnnnnnnnnnnnnnnnnnnnnnnnnnnnnnnnnnnnnnnnnnnnnnnnnnnnnnnnnnnnnnnnnnnnnnnnnnnnnnnnnnnnnnnnnnnnnnnnnnnnnnnnnnnnnnnnnnnnnnnnnnnnnnnnnnnnnnnnnnnnnnnnnnnnnnnnnnnnnnnnnnnnnnnnnnnnnnnnnnnnnnnnnnnnnnnnnnnnnnnnnnnnnnnnnnnnnnnnnnnnnnnnnnnnnnnnnnnnnnnnnnnnnnnnnnnnnnnnnnnnnnnnnnnnnnnnnnnnnnnnnnnnnnnnnnnnnnnnnnnnnnnnnnnnnnnnnnnnnnnnnnnnnnnnnnnnnnnnnnnnnnnnnnnnnnnnnnnnnnnnnnnnnnnnnnnnnnnnnnnnnnnnnnnnnnnnnnnnnnnnnnnnnnnnnnnnnnnnnnnnnnnnnnnnnnnnnnnnnnnnnnnnnnnnnnnnnnnnnnnnnnnnnnnnnnnnnnnnnnnnnnnnnnnnnnnnnnnnnnnnnnnnnnnnnnnnnnnnnnnnnnnnnnnnnnnnnnnnnnnnnnnnnnnnnnnnnnnnnnnnnnnnnnnnnnnnnnnnnnnnnnnnnnnnnnnnnnnnnnnnnnnnnnnnnnnnnnnnnnnnnnnnnnnnnnnnnnnnnnnnnnnnnnnnnnnnnnnnnnnnnnnnnnnnnnnnnnnnnnnnnnnnnnnnnnnnnnnnnnnnnnnnnnnnnnnnnnnnnnnnnnnnnnnnnnnnnnnnnnnnnnnnnnnnnnnnnnnnnnnnnnnnnnnnnnnnnnnnnnnnnnnnnnnnnnnnnnnnnnnnnnnnnnnnnnnnnnnnnnnnnnnnnnnnnnnnnnnnnnnnnnnnnnnnnnnnnnnnnnnnnnnnnnnnnnnnnnnnnnnnnnnnnnnnnnnnnnnnnnnnnnnnnnnnnnnnnnnnnnnnnnnnnnnnnnnnnnnnnnnnnnnnnnnnnnnnnnnnnnnnnnnnnnnnnnnnnnnnnnnnnnnnnnnnnnnnnnnnnnnnnnnnnnnnnnnnnnnnnnnnnnnnnnnnnnnnnnnnnnnnnnnnnnnnnnnnnnnnnnnnnnnnnnnnnnnnnnnnnnnnnnnnnnnnnnnnnnnnnnnnnnnnnnnnnnnnnnnnnnnnnnnnnnnnnnnnnnnnnnnnnnnnnnnnnnnnnnnnnnnnnnnnnnnnnnnnnnnnnnnnnnnnnnnnnnnnnnnnnnnnnnnnnnnnnnnnnnnnnnnnnnnnnnnnnnnnnnnnnnnnnnnnnnnnnnnnnnnnnnnnnnnnnnnnnnnnnnnnnnnnnnnnnnnnnnnnnnnnnnnnnnnnnnnnnnnnnnnnnnnnnnnnnnnnnnnnnnnnnnnnnnnnnnnnnnnnnnnnnnnnnnnnnnnnnnnnnnnnnnnnnnnnnnnnnnnnnnnnnnnnnnnnnnnnnnnnnnnnnnnnnnnnnnnnnnnnnnnnnnnnnnnnnnnnnnnnnnnnnnnnnnnnnnnnnnnnnnnnnnnnnnnnnnnnnnnnnnnnnnnnnnnnnnnnnnnnnnnnnnnnnnnnnnnnnnnnnnnnnnnnnnnnnnnnnnnnnnnnnnnnnnnnnnnnnnnnnnnnnnnnnnnnnnnnnnnnnnnnnnnnnnnnnnnnnnnnnnnnnnnnnnnnnnnnnnnnnnnnnnnnnnnnnnnnnnnnnnnnnnnnnnnnnnnnnnnnnnnnnnnnnnnnnnnnnnnnnnnnnnnnnnnnnnnnnnnnnnnnnnnnnnnnnnnnnnnnnnnnnnnnnnnnnnnnnnnnnnnnnnnnnnnnnnnnnnnnnnnnnnnnnnnnnnnnnnnnnnnnnnnnnnnnnnnnnnnnnnnnnnnnnnnnnnnnnnnnnnnnnnnnnnnnnnnnnnnnnnnnnnnnnnnnnnnnnnnnnnnnnnnnnnnnnnnnnnnnnnnnnnnnnnnnnnnnnnnnnnnnnnnnnnnnnnnnnnnnnnnnnnnnnnnnnnnnnnnnnnnnnnnnnnnnnnnnnnnnnnnnnnnnnnnnnnnnnnnnnnnnnnnnnnnnnnnnnnnnnnnnnnnnnnnnnnnnnnnnnnnnnnnnnnnnnnnnnnnnnnnnnnnnnnnnnnnnnnnnnnnnnnnnnnnnnnnnnnnnnnnnnnnnnnnnnnnnnnnnnnnnnnnnnnnnnnnnnnnnnnnnnnnnnnnnnnnnnnnnnnnnnnnnnnnnnnnnnnnnnnnnnnnnnnnnnnnnnnnnnnnnnnnnnnnnnnnnnnnnnnnnnnnnnnnnnnnnnnnnnnnnnnnnnnnnnnnnnnnnnnnnnnnnnnnnnnnnnnnnnnnnnnnnnnnnnnnnnnnnnnnnnnnnnnnnnnnnnnnnnnnnnnnnnnnnnnnnnnnnnnnnnnnnnnnnnnnnnnnnnnnnnnnnnnnnnnnnnnnnnnnnnnnnnnnnnnnnnnnnnnnnnnnnnnnnnnnnnnnnnnnnnnnnnnnnnnnnnnnnnnnnnnnnnnnnnnnnnnnnnnnnnnnnnnnnnnnnnnnnnnnnnnnnnnnnnnnnnnnnnnnnnnnnnnnnnnnnnnnnnnnnnnnnnnnnnnnnnnnnnnnnnnnnnnnnnnnnnnnnnnnnnnnnnnnnnnnnnnnnnnnnnnnnnnnnnnnnnnnnnnnnnnnnnnnnnnnnnnnnnnnnnnnnnnnnnnnnnnnnnnnnnnnnnnnnnnnnnnnnnnnnnnnnnnnnnnnnnnnnnnnnnnnnnnnnnnnnnnnnnnnnnnnnnnnnnnnnnnnnnnnnnnnnnnnnnnnnnnnnnnnnnnnnnnnnnnnnnnnnnnnnnnnnnnnnnnnnnnnnnnnnnnnnnnnnnnnnnnnnnnnnnnnnnnnnnnnnnnnnnnnnnnnnnnnnnnnnnnnnnnnnnnnnnnnnnnnnnnnnnnnnnnnnnnnnnnnnnnnnnnnnnnnnnnnnnnnnnnnnnnnnnnnnnnnnnnnnnnnnnnnnnnnnnnnnnnnnnnnnnnnnnnnnnnnnnnnnnnnnnnnnnnnnnnnnnnnnnnnnnnnnnnnnnnnnnnnnnnnnnnnnnnnnnnnnnnnnnnnnnnnnnnnnnnnnnnnnnnnnnnnnnnnnnnnnnnnnnnnnnnnnnnnnnnnnnnnnnnnnnnnnnnnnnnnnnnnnnnnnnnnnnnnnnnnnnnnnnnnnnnnnnnnnnnnnnnnnnnnnnnnnnnnnnnnnnnnnnnnnnnnnnnnnnnnnnnnnnnnnnnnnnnnnnnnnnnnnnnnnnnnnnnnnnnnnnnnnnnnnnnnnnnnnnnnnnnnnnnnnnnnnnnnnnnnnnnnnnnnnnnnnnnnnnnnnnnnnnnnnnnnnnnnnnnnnnnnnnnnnnnnnnnnnnnnnnnnnnnnnnnnnnnnnnnnnnnnnnnnnnnnnnnnnnnnnnnnnnnnnnnnnnnnnnnnnnnnnnnnnnnnnnnnnnnnnnnnnnnnnnnnnnnnnnnnnnnnnnnnnnnnnnnnnnnnnnnnnnnnnnnnnnnnnnnnnnnnnnnnnnnnnnnnnnnnnnnnnnnnnnnnnnnnnnnnnnnnnnnnnnnnnnnnnnnnnnnnnnnnnnnnnnnnnnnnnnnnnnnnnnnnnnnnnnnnnnnnnnnnnnnnnnnnnnnnnnnnnnnnnnnnnnnnnnnnnnnnnnnnnnnnnnnnnnnnnnnnnnnnnnnnnnnnnnnnnnnnnnnnnnnnnnnnnnnnnnnnnnnnnnnnnnnnnnnnnnnnnnnnnnnnnnnnnnnnnnnnnnnnnnnnnnnnnnnnnnnnnnnnnnnnnnnnnnnnnnnnnnnnnnnnnnnnnnnnnnnnnnnnnnnnnnnnnnnnnnnnnnnnnnnnnnnnnnnnnnnnnnnnnnnnnnnnnnnnnnnnnnnnnnnnnnnnnnnnnnnnnnnnnnnnnnnnnnnnnnnnnnnnnnnnnnnnnnnnnnnnnnnnnnnnnnnnnnnnnnnnnnnnnnnnnnnnnnnnnnnnnnnnnnnnnnnnnnnnnnnnnnnnnnnnnnnnnnnnnnnnnnnnnnnnnnnnnnnnnnnnnnnnnnnnnnnnnnnnnnnnnnnnnnnnnnnnnnnnnnnnnnnnnnnnnnnnnnnnnnnnnnnnnnnnnnnnnnnnnnnnnnnnnnnnnnnnnnnnnnnnnnnnnnnnnnnnnnnnnnnnnnnnnnnnnnnnnnnnnnnnnnnnnnnnnnnnnnnnnnnnnnnnnnnnnnnnnnnnnnnnnnnnnnnnnnnnnnnnnnnnnnnnnnnnnnnnnnnnnnnnnnnnnnnnnnnnnnnnnnnnnnnnnnnnnnnnnnnnnnnnnnnnnnnnnnnnnnnnnnnnnnnnnnnnnnnnnnnnnnnnnnnnnnnnnnnnnnnnnnnnnnnnnnnnnnnnnnnnnnnnnnnnnnnnnnnnnnnnnnnnnnnnnnnnnnnnnnnnnnnnnnnnnnnnnnnnnnnnnnnnnnnnnnnnnnnnnnnnnnnnnnnnnnnnnnnnnnnnnnnnnnnnnnnnnnnnnnnnnnnnnnnnnnnnnnnnnnnnnnnnnnnnnnnnnnnnnnnnnnnnnnnnnnnnnnnnnnnnnnnnnnnnnnnnnnnnnnnnnnnnnnnnnnnnnnnnnnnnnnnnnnnnnnnnnnnnnnnnnnnnnnnnnnnnnnnnnnnnnnnnnnnnnnnnnnnnnnnnnnnnnnnnnnnnnnnnnnnnnnnnnnnnnnnnnnnnnnnnnnnnnnnnnnnnnnnnnnnnnnnnnnnnnnnnnnnnnnnnnnnnnnnnnnnnnnnnnnnnnnnnnnnnnnnnnnnnnnnnnnnnnnnnnnnnnnnnnnnnnnnnnnnnnnnnnnnnnnnnnnnnnnnnnnnnnnnnnnnnnnnnnnnnnnnnnnnnnnnnnnnnnnnnnnnnnnnnnnnnnnnnnnnnnnnnnnnnnnnnnnnnnnnnnnnnnnnnnnnnnnnnnnnnnnnnnnnnnnnnnnnnnnnnnnnnnnnnnnnnnnnnnnnnnnnnnnnnnnnnnnnnnnnnnnnnnnnnnnnnnnnnnnnnnnnnnnnnnnnnnnnnnnnnnnnnnnnnnnnnnnnnnnnnnnnnnnnnnnnnnnnnnnnnnnnnnnnnnnnnnnnnnnnnnnnnnnnnnnnnnnnnnnnnnnnnnnnnnnnnnnnnnnnnnnnnnnnnnnnnnnnnnnnnnnnnnnnnnnnnnnnnnnnnnnnnnnnnnnnnnnnnnnnnnnnnnnnnnnnnnnnnnnnnnnnnnnnnnnnnnnnnnnnnnnnnnnnnnnnnnnnnnnnnnnnnnnnnnnnnnnnnnnnnnnnnnnnnnnnnnnnnnnnnnnnnnnnnnnnnnnnnnnnnnnnnnnnnnnnnnnnnnnnnnnnnnnnnnnnnnnnnnnnnnnnnnnnnnnnnnnnnnnnnnnnnnnnnnnnnnnnnnnnnnnnnnnnnnnnnnnnnnnnnnnnnnnnnnnnnnnnnnnnnnnnnnnnnnnnnnnnnnnnnnnnnnnnnnnnnnnnnnnnnnnnnnnnnnnnnnnnnnnnnnnnnnnnnnnnnnnnnnnnnnnnnnnnnnnnnnnnnnnnnnnnnnnnnnnnnnnnnnnnnnnnnnnnnnnnnnnnnnnnnnnnnnnnnnnnnnnnnnnnnnnnnnnnnnnnnnnnnnnnnnnnnnnnnnnnnnnnnnnnnnnnnnnnnnnnnnnnnnnnnnnnnnnnnnnnnnnnnnnnnnnnnnnnnnnnnnnnnnnnnnnnnnnnnnnnnnnnnnnnnnnnnnnnnnnnnnnnnnnnnnnnnnnnnnnnnnnnnnnnnnnnnnnnnnnnnnnnnnnnnnnnnnnnnnnnnnnnnnnnnnnnnnnnnnnnnnnnnnnnnnnnnnnnnnnnnnnnnnnnnnnnnnnnnnnnnnnnnnnnnnnnnnnnnnnnnnnnnnnnnnnnnnnnnnnnnnnnnnnnnnnnnnnnnnnnnnnnnnnnnnnnnnnnnnnnnnnnnnnnnnnnnnnnnnnnnnnnnnnnnnnnnnnnnnnnnnnnnnnnnnnnnnnnnnnnnnnnnnnnnnnnnnnnnnnnnnnnnnnnnnnnnnnnnnnnnnnnnnnnnnnnnnnnnnnnnnnnnnnnnnnnnnnnnnnnnnnnnnnnnnnnnnnnnnnnnnnnnnnnnnnnnnnnnnnnnnnnnnnnnnnnnnnnnnnnnnnnnnnnnnnnnnnnnnnnnnnnnnnnnnnnnnnnnnnnnnnnnnnnnnnnnnnnnnnnnnnnnnnnnnnnnnnnnnnnnnnnnnnnnnnnnnnnnnnnnnnnnnnnnnnnnnnnnnnnnnnnnnnnnnnnnnnnnnnnnnnnnnnnnnnnnnnnnnnnnnnnnnnnnnnnnnnnnnnnnnnnnnnnnnnnnnnnnnnnnnnnnnnnnnnnnnnnnnnnnnnnnnnnnnnnnnnnnnnnnnnnnnnnnnnnnnnnnnnnnnnnnnnnnnnnnnnnnnnnnnnnnnnnnnnnnnnnnnnnnnnnnnnnnnnnnnnnnnnnnnnnnnnnnnnnnnnnnnnnnnnnnnnnnnnnnnnnnnnnnnnnnnnnnnnnnnnnnnnnnnnnnnnnnnnnnnnnnnnnnnnnnnnnnnnnnnnnnnnnnnnnnnnnnnnnnnnnnnnnnnnnnnnnnnnnnnnnnnnnnnnnnnnnnnnnnnnnnnnnnnnnnnnnnnnnnnnnnnnnnnnnnnnnnnnnnnnnnnnnnnnnnnnnnnnnnnnnnnnnnnnnnnnnnnnnnnnnnnnnnnnnnnnnnnnnnnnnnnnnnnnnnnnnnnnnnnnnnnnnnnnnnnnnnnnnnnnnnnnnnnnnnnnnnnnnnnnnnnnnnnnnnnnnnnnnnnnnnnnnnnnnnnnnnnnnnnnnnnnnnnnnnnnnnnnnnnnnnnnnnnnnnnnnnnnnnnnnnnnnnnnnnnnnnnnnnnnnnnnnnnnnnnnnnnnnnnnnnnnnnnnnnnnnnnnnnnnnnnnnnnnnnnnnnnnnnnnnnnnnnnnnnnnnnnnnnnnnnnnnnnnnnnnnnnnnnnnnnnnnnnnnnnnnnnnnnnnnnnnnnnnnnnnnnnnnnnnnnnnnnnnnnnnnnnnnnnnnnnnnnnnnnnnnnnnnnnnnnnnnnnnnnnnnnnnnnnnnnnnnnnnnnnnnnnnnnnnnnnnnnnnnnnnnnnnnnnnnnnnnnnnnnnnnnnnnnnnnnnnnnnnnnnnnnnnnnnnnnnnnnnnnnnnnnnnnnnnnnnnnnnnnnnnnnnnnnnnnnnnnnnnnnnnnnnnnnnnnnnnnnnnnnnnnnnnnnnnnnnnnnnnnnnnnnnnnnnnnnnnnnnnnnnnnnnnnnnnnnnnnnnnnnnnnnnnnnnnnnnnnnnnnnnnnnnnnnnnnnnnnnnnnnnnnnnnnnnnnnnnnnnnnnnnnnnnnnnnnnnnnnnnnnnnnnnnnnnnnnnnnnnnnnnnnnnnnnnnnnnnnnnnnnnnnnnnnnnnnnnnnnnnnnnnnnnnnnnnnnnnnnnnnnnnnnnnnnnnnnnnnnnnnnnnnnnnnnnnnnnnnnnnnnnnnnnnnnnnnnnnnnnnnnnnnnnnnnnnnnnnnnnnnnnnnnnnnnnnnnnnnnnnnnnnnnnnnnnnnnnnnnnnnnnnnnnnnnnnnnnnnnnnnnnnnnnnnnnnnnnnnnnnnnnnnnnnnnnnnnnnnnnnnnnnnnnnnnnnnnnnnnnnnnnnnnnnnnnnnnnnnnnnnnnnnnnnnnnnnnnnnnnnnnnnnnnnnnnnnnnnnnnnnnnnnnnnnnnnnnnnnnnnnnnnnnnnnnnnnnnnnnnnnnnnnnnnnnnnnnnnnnnnnnnnnnnnnnnnnnnnnnnnnnnnnnnnnnnnnnnnnnnnnnnnnnnnnnnnnnnnnnnnnnnnnnnnnnnnnnnnnnnnnnnnnnnnnnnnnnnnnnnnnnnnnnnnnnnnnnnnnnnnnnnnnnnnnnnnnnnnnnnnnnnnnnnnnnnnnnnnnnnnnnnnnnnnnnnnnnnnnnnnnnnnnnnnnnnnnnnnnnnnnnnnnnnnnnnnnnnnnnnnnnnnnnnnnnnnnnnnnnnnnnnnnnnnnnnnnnnnnnnnnnnnnnnnnnnnnnnnnnnnnnnnnnnnnnnnnnnnnnnnnnnnnnnnnnnnnnnnnnnnnnnnnnnnnnnnnnnnnnnnnnnnnnnnnnnnnnnnnnnnnnnnnnnnnnnnnnnnnnnnnnnnnnnnnnnnnnnnnnnnnnnnnnnnnnnnnnnnnnnnnnnnnnnnnnnnnnnnnnnnnnnnnnnnnnnnnnnnnnnnnnnnnnnnnnnnnnnnnnnnnnnnnnnnnnnnnnnnnnnnnnnnnnnnnnnnnnnnnnnnnnnnnnnnnnnnnnnnnnnnnnnnnnnnnnnnnnnnnnnnnnnnnnnnnnnnnnnnnnnnnnnnnnnnnnnnnnnnnnnnnnnnnnnnnnnnnnnnnnnnnnnnnnnnnnnnnnnnnnnnnnnnnnnnnnnnnnnnnnnnnnnnnnnnnnnnnnnnnnnnnnnnnnnnnnnnnnnnnnnnnnnnnnnnnnnnnnnnnnnnnnnnnnnnnnnnnnnnnnnnnnnnnnnnnnnnnnnnnnnnnnnnnnnnnnnnnnnnnnnnnnnnnnnnnnnnnnnnnnnnnnnnnnnnnnnnnnnnnnnnnnnnnnnnnnnnnnnnnnnnnnnnnnnnnnnnnnnnnnnnnnnnnnnnnnnnnnnnnnnnnnnnnnnnnnnnnnnnnnnnnnnnnnnnnnnnnnnnnnnnnnnnnnnnnnnnnnnnnnnnnnnnnnnnnnnnnnnnnnnnnnnnnnnnnnnnnnnnnnnnnnnnnnnnnnnnnnnnnnnnnnnnnnnnnnnnnnnnnnnnnnnnnnnnnnnnnnnnnnnnnnnnnnnnnnnnnnnnnnnnnnnnnnnnnnnnnnnnnnnnnnnnnnnnnnnnnnnnnnnnnnnnnnnnnnnnnnnnnnnnnnnnnnnnnnnnnnnnnnnnnnnnnnnnnnnnnnnnnnnnnnnnnnnnnnnnnnnnnnnnnnnnnnnnnnnnnnnnnnnnnnnnnnnnnnnnnnnnnnnnnnnnnnnnnnnnnnnnnnnnnnnnnnnnnnnnnnnnnnnnnnnnnnnnnnnnnnnnnnnnnnnnnnnnnnnnnnnnnnnnnnnnnnnnnnnnnnnnnnnnnnnnnnnnnnnnnnnnnnnnnnnnnnnnnnnnnnnnnnnnnnnnnnnnnnnnnnnnnnnnnnnnnnnnnnnnnnnnnnnnnnnnnnnnnnnnnnnnnnnnnnnnnnnnnnnnnnnnnnnnnnnnnnnnnnnnnnnnnnnnnnnnnnnnnnnnnnnnnnnnnnnnnnnnnnnnnnnnnnnnnnnnnnnnnnnnnnnnnnnnnnnnnnnnnnnnnnnnnnnnnnnnnnnnnnnnnnnnnnnnnnnnnnnnnnnnnnnnnnnnnnnnnnnnnnnnnnnnnnnnnnnnnnnnnnnnnnnnnnnnnnnnnnnnnnnnnnnnnnnnnnnnnnnnnnnnnnnnnnnnnnnnnnnnnnnnnnnnnnnnnnnnnnnnnnnnnnnnnnnnnnnnnnnnnnnnnnnnnnnnnnnnnnnnnnnnnnnnnnnnnnnnnnnnnnnnnnnnnnnnnnnnnnnnnnnnnnnnnnnnnnnnnnnnnnnnnnnnnnnnnnnnnnnnnnnnnnnnnnnnnnnnnnnnnnnnnnnnnnnnnnnnnnnnnnnnnnnnnnnnnnnnnnnnnnnnnnnnnnnnnnnnnnnnnnnnnnnnnnnnnnnnnnnnnnnnnnnnnnnnnnnnnnnnnnnnnnnnnnnnnnnnnnnnnnnnnnnnnnnnnnnnnnnnnnnnnnnnnnnnnnnnnnnnnnnnnnnnnnnnnnnnnnnnnnnnnnnnnnnnnnnnnnnnnnnnnnnnnnnnnnnnnnnnnnnnnnnnnnnnnnnnnnnnnnnnnnnnnnnnnnnnnnnnnnnnnnnnnnnnnnnnnnnnnnnnnnnnnnnnnnnnnnnnnnnnnnnnnnnnnnnnnnnnnnnnnnnnnnnnnnnnnnnnnnnnnnnnnnnnnnnnnnnnnnnnnnnnnnnnnnnnnnnnnnnnnnnnnnnnnnnnnnnnnnnnnnnnnnnnnnnnnnnnnnnnnnnnnnnnnnnnnnnnnnnnnnnnnnnnnnnnnnnnnnnnnnnnnnnnnnnnnnnnnnnnnnnnnnnnnnnnnnnnnnnnnnnnnnnnnnnnnnnnnnnnnnnnnnnnnnnnnnnnnnnnnnnnnnnnnnnnnnnnnnnnnnnnnnnnnnnnnnnnnnnnnnnnnnnnnnnnnnnnnnnnnnnnnnnnnnnnnnnnnnnnnnnnnnnnnnnnnnnnnnnnnnnnnnnnnnnnnnnnnnnnnnnnnnnnnnnnnnnnnnnnnnnnnnnnnnnnnnnnnnnnnnnnnnnnnnnnnnnnnnnnnnnnnnnnnnnnnnnnnnnnnnnnnnnnnnnnnnnnnnnnnnnnnnnnnnnnnnnnnnnnnnnnnnnnnnnnnnnnnnnnnnnnnnnnnnnnnnnnnnnnnnnnnnnnnnnnnnnnnnnnnnnnnnnnnnnnnnnnnnnnnnnnnnnnnnnnnnnnnnnnnnnnnnnnnnnnnnnnnnnnnnnnnnnnnnnnnnnnnnnnnnnnnnnnnnnnnnnnnnnnnnnnnnnnnnnnnnnnnnnnnnnnnnnnnnnnnnnnnnnnnnnnnnnnnnnnnnnnnnnnnnnnnnnnnnnnnnnnnnnnnnnnnnnnnnnnnnnnnnnnnnnnnnnnnnnnnnnnnnnnnnnnnnnnnnnnnnnnnnnnnnnnnnnnnnnnnnnnnnnnnnnnnnnnnnnnnnnnnnnnnnnnnnnnnnnnnnnnnnnnnnnnnnnnnnnnnnnnnnnnnnnnnnnnnnnnnnnnnnnnnnnnnnnnnnnnnnnnnnnnnnnnnnnnnnnnnnnnnnnnnnnnnnnnnnnnnnnnnnnnnnnnnnnnnnnnnnnnnnnnnnnnnnnnnnnnnnnnnnnnnnnnnnnnnnnnnnnnnnnnnnnnnnnnnnnnnnnnnnnnnnnnnnnnnnnnnnnnnnnnnnnnnnnnnnnnnnnnnnnnnnnnnnnnnnnnnnnnnnnnnnnnnnnnnnnnnnnnnnnnnnnnnnnnnnnnnnnnnnnnnnnnnnnnnnnnnnnnnnnnnnnnnnnnnnnnnnnnnnnnnnnnnnnnnnnnnnnnnnnnnnnnnnnnnnnnnnnnnnnnnnnnnnnnnnnnnnnnnnnnnnnnnnnnnnnnnnnnnnnnnnnnnnnnnnnnnnnnnnnnnnnnnnnnnnnnnnnnnnnnnnnnnnnnnnnnnnnnnnnnnnnnnnnnnnnnnnnnnnnnnnnnnnnnnnnnnnnnnnnnnnnnnnnnnnnnnnnnnnnnnnnnnnnnnnnnnnnnnnnnnnnnnnnnnnnnnnnnnnnnnnnnnnnnnnnnnnnnnnnnnnnnnnnnnnnnnnnnnnnnnnnnnnnnnnnnnnnnnnnnnnnnnnnnnnnnnnnnnnnnnnnnnnnnnnnnnnnnnnnnnnnnnnnnnnnnnnnnnnnnnnnnnnnnnnnnnnnnnnnnnnnnnnnnnnnnnnnnnnnnnnnnnnnnnnnnnnnnnnnnnnnnnnnnnnnnnnnnnnnnnnnnnnnnnnnnnnnnnnnnnnnnnnnnnnnnnnnnnnnnnnnnnnnnnnnnnnnnnnnnnnnnnnnnnnnnnnnnnnnnnnnnnnnnnnnnnnnnnnnnnnnnnnnnnnnnnnnnnnnnnnnnnnnnnnnnnnnnnnnnnnnnnnnnnnnnnnnnnnnnnnnnnnnnnnnnnnnnnnnnnnnnnnnnnnnnnnnnnnnnnnnnnnnnnnnnnnnnnnnnnnnnnnnnnnnnnnnnnnnnnnnnnnnnnnnnnnnnnnnnnnnnnnnnnnnnnnnnnnnnnnnnnnnnnnnnnnnnnnnnnnnnnnnnnnnnnnnnnnnnnnnnnnnnnnnnnnnnnnnnnnnnnnnnnnnnnnnnnnnnnnnnnnnnnnnnnnnnnnnnnnnnnnnnnnnnnnnnnnnnnnnnnnnnnnnnnnnnnnnnnnnnnnnnnnnnnnnnnnnnnnnnnnnnnnnnnnnnnnnnnnnnnnnnnnnnnnnnnnnnnnnnnnnnnnnnnnnnnnnnnnnnnnnnnnnnnnnnnnnnnnnnnnnnnnnnnnnnnnnnnnnnnnnnnnnnnnnnnnnnnnnnnnnnnnnnnnnnnnnnnnnnnnnnnnnnnnnnnnnnnnnnnnnnnnnnnnnnnnnnnnnnnnnnnnnnnnnnnnnnnnnnnnnnnnnnnnnnnnnnnnnnnnnnnnnnnnnnnnnnnnnnnnnnnnnnnnnnnnnnnnnnnnnnnnnnnnnnnnnnnnnnnnnnnnnnnnnnnnnnnnnnnnnnnnnnnnnnnnnnnnnnnnnnnnnnnnnnnnnnnnnnnnnnnnnnnnnnnnnnnnnnnnnnnnnnnnnnnnnnnnnnnnnnnnnnnnnnnnnnnnnnnnnnnnnnnnnnnnnnnnnnnnnnnnnnnnnnnnnnnnnnnnnnnnnnnnnnnnnnnnnnnnnnnnnnnnnnnnnnnnnnnnnnnnnnnnnnnnnnnnnnnnnnnnnnnnnnnnnnnnnnnnnnnnnnnnnnnnnnnnnnnnnnnnnnnnnnnnnnnnnnnnnnnnnnnnnnnnnnnnnnnnnnnnnnnnnnnnnnnnnnnnnnnnnnnnnnnnnnnnnnnnnnnnnnnnnnnnnnnnnnnnnnnnnnnnnnnnnnnnnnnnnnnnnnnnnnnnnnnnnnnnnnnnnnnnnnnnnnnnnnnnnnnnnnnnnnnnnnnnnnnnnnnnnnnnnnnnnnnnnnnnnnnnnnnnnnnnnnnnnnnnnnnnnnnnnnnnnnnnnnnnnnnnnnnnnnnnnnnnnnnnnnnnnnnnnnnnnnnnnnnnnnnnnnnnnnnnnnnnnnnnnnnnnnnnnnnnnnnnnnnnnnnnnnnnnnnnnnnnnnnnnnnnnnnnnnnnnnnnnnnnnnnnnnnnnnnnnnnnnnnnnnnnnnnnnnnnnnnnnnnnnnnnnnnnnnnnnnnnnnnnnnnnnnnnnnnnnnnnnnnnnnnnnnnnnnnnnnnnnnnnnnnnnnnnnnnnnnnnnnnnnnnnnnnnnnnnnnnnnnnnnnnnnnnnnnnnnnnnnnnnnnnnnnnnnnnnnnnnnnnnnnnnnnnnnnnnnnnnnnnnnnnnnnnnnnnnnnnnnnnnnnnnnnnnnnnnnnnnnnnnnnnnnnnnnnnnnnnnnnnnnnnnnnnnnnnnnnnnnnnnnnnnnnnnnnnnnnnnnnnnnnnnnnnnnnnnnnnnnnnnnnnnnnnnnnnnnnnnnnnnnnnnnnnnnnnnnnnnnnnnnnnnnnnnnnnnnnnnnnnnnnnnnnnnnnnnnnnnnnnnnnnnnnnnnnnnnnnnnnnnnnnnnnnnnnnnnnnnnnnnnnnnnnnnnnnnnnnnnnnnnnnnnnnnnnnnnnnnnnnnnnnnnnnnnnnnnnnnnnnnnnnnnnnnnnnnnnnnnnnnnnnnnnnnnnnnnnnnnnnnnnnnnnnnnnnnnnnnnnnnnnnnnnnnnnnnnnnnnnnnnnnnnnnnnnnnnnnnnnnnnnnnnnnnnnnnnnnnnnnnnnnnnnnnnnnnnnnnnnnnnnnnnnnnnnnnnnnnnnnnnnnnnnnnnnnnnnnnnnnnnnnnnnnnnnnnnnnnnnnnnnnnnnnnnnnnnnnnnnnnnnnnnnnnnnnnnnnnnnnnnnnnnnnnnnnnnnnnnnnnnnnnnnnnnnnnnnnnnnnnnnnnnnnnnnnnnnnnnnnnnnnnnnnnnnnnnnnnnnnnnnnnnnnnnnnnnnnnnnnnnnnnnnnnnnnnnnnnnnnnnnnnnnnnnnnnnnnnnnnnnnnnnnnnnnnnnnnnnnnnnnnnnnnnnnnnnnnnnnnnnnnnnnnnnnnnnnnnnnnnnnnnnnnnnnnnnnnnnnnnnnnnnnnnnnnnnnnnnnnnnnnnnnnnnnnnnnnnnnnnnnnnnnnnnnnnnnnnnnnnnnnnnnnnnnnnnnnnnnnnnnnnnnnnnnnnnnnnnnnnnnnnnnnnnnnnnnnnnnnnnnnnnnnnnnnnnnnnnnnnnnnnnnnnnnnnnnnnnnnnnnnnnnnnnnnnnnnnnnnnnnnnnnnnnnnnnnnnnnnnnnnnnnnnnnnnnnnnnnnnnnnnnnnnnnnnnnnnnnnnnnnnnnnnnnnnnnnnnnnnnnnnnnnnnnnnnnnnnnnnnnnnnnnnnnnnnnnnnnnnnnnnnnnnnnnnnnnnnnnnnnnnnnnnnnnnnnnnnnnnnnnnnnnnnnnnnnnnnnnnnnnnnnnnnnnnnnnnnnnnnnnnnnnnnnnnnnnnnnnnnnnnnnnnnnnnnnnnnnnnnnnnnnnnnnnnnnnnnnnnnnnnnnnnnnnnnnnnnnnnnnnnnnnnnnnnnnnnnnnnnnnnnnnnnnnnnnnnnnnnnnnnnnnnnnnnnnnnnnnnnnnnnnnnnnnnnnnnnnnnnnnnnnnnnnnnnnnnnnnnnnnnnnnnnnnnnnnnnnnnnnnnnnnnnnnnnnnnnnnnnnnnnnnnnnnnnnnnnnnnnnnnnnnnnnnnnnnnnnnnnnnnnnnnnnnnnnnnnnnnnnnnnnnnnnnnnnnnnnnnnnnnnnnnnnnnnnnnnnnnnnnnnnnnnnnnnnnnnnnnnnnnnnnnnnnnnnnnnnnnnnnnnnnnnnnnnnnnnnnnnnnnnnnnnnnnnnnnnnnnnnnnnnnnnnnnnnnnnnnnnnnnnnnnnnnnnnnnnnnnnnnnnnnnnnnnnnnnnnnnnnnnnnnnnnnnnnnnnnnnnnnnnnnnnnnnnnnnnnnnnnnnnnnnnnnnnnnnnnnnnnnnnnnnnnnnnnnnnnnnnnnnnnnnnnnnnnnnnnnnnnnnnnnnnnnnnnnnnnnnnnnnnnnnnnnnnnnnnnnnnnnnnnnnnnnnnnnnnnnnnnnnnnnnnnnnnnnnnnnnnnnnnnnnnnnnnnnnnnnnnnnnnnnnnnnnnnnnnnnnnnnnnnnnnnnnnnnnnnnnnnnnnnnnnnnnnnnnnnnnnnnnnnnnnnnnnnnnnnnnnnnnnnnnnnnnnnnnnnnnnnnnnnnnnnnnnnnnnnnnnnnnnnnnnnnnnnnnnnnnnnnnnnnnnnnnnnnnnnnnnnnnnnnnnnnnnnnnnnnnnnnnnnnnnnnnnnnnnnnnnnnnnnnnnnnnnnnnnnnnnnnnnnnnnnnnnnnnnnnnnnnnnnnnnnnnnnnnnnnnnnnnnnnnnnnnnnnnnnnnnnnnnnnnnnnnnnnnnnnnnnnnnnnnnnnnnnnnnnnnnnnnnnnnnnnnnnnnnnnnnnnnnnnnnnnnnnnnnnnnnnnnnnnnnnnnnnnnnnnnnnnnnnnnnnnnnnnnnnnnnnnnnnnnnnnnnnnnnnnnnnnnnnnnnnnnnnnnnnnnnnnnnnnnnnnnnnnnnnnnnnnnnnnnnnnnnnnnnnnnnnnnnnnnnnnnnnnnnnnnnnnnnnnnnnnnnnnnnnnnnnnnnnnnnnnnnnnnnnnnnnnnnnnnnnnnnnnnnnnnnnnnnnnnnnnnnnnnnnnnnnnnnnnnnnnnnnnnnnnnnnnnnnnnnnnnnnnnnnnnnnnnnnnnnnnnnnnnnnnnnnnnnnnnnnnnnnnnnnnnnnnnnnnnnnnnnnnnnnnnnnnnnnnnnnnnnnnnnnnnnnnnnnnnnnnnnnnnnnnnnnnnnnnnnnnnnnnnnnnnnnnnnnnnnnnnnnnnnnnnnnnnnnnnnnnnnnnnnnnnnnnnnnnnnnnnnnnnnnnnnnnnnnnnnnnnnnnnnnnnnnnnnnnnnnnnnnnnnnnnnnnnnnnnnnnnnnnnnnnnnnnnnnnnnnnnnnnnnnnnnnnnnnnnnnnnnnnnnnnnnnnnnnnnnnnnnnnnnnnnnnnnnnnnnnnnnnnnnnnnnnnnnnnnnnnnnnnnnnnnnnnnnnnnnnnnnnnnnnnnnnnnnnnnnnnnnnnnnnnnnnnnnnnnnnnnnnnnnnnnnnnnnnnnnnnnnnnnnnnnnnnnnnnnnnnnnnnnnnnnnnnnnnnnnnnnnnnnnnnnnnnnnnnnnnnnnnnnnnnnnnnnnnnnnnnnnnnnnnnnnnnnnnnnnnnnnnnnnnnnnnnnnnnnnnnnnnnnnnnnnnnnnnnnnnnnnnnnnnnnnnnnnnnnnnnnnnnnnnnnnnnnnnnnnnnnnnnnnnnnnnnnnnnnnnnnnnnnnnnnnnnnnnnnnnnnnnnnnnnnnnnnnnnnnnnnnnnnnnnnnnnnnnnnnnnnnnnnnnnnnnnnnnnnnnnnnnnnnnnnnnnnnnnnnnnnnnnnnnnnnnnnnnnnnnnnnnnnnnnnnnnnnnnnnnnnnnnnnnnnnnnnnnnnnnnnnnnnnnnnnnnnnnnnnnnnnnnnnnnnnnnnnnnnnnnnnnnnnnnnnnnnnnnnnnnnnnnnnnnnnnnnnnnnnnnnnnnnnnnnnnnnnnnnnnnnnnnnnnnnnnnnnnnnnnnnnnnnnnnnnnnnnnnnnnnnnnnnnnnnnnnnnnnnnnnnnnnnnnnnnnnnnnnnnnnnnnnnnnnnnnnnnnnnnnnnnnnnnnnnnnnnnnnnnnnnnnnnnnnnnnnnnnnnnnnnnnnnnnnnnnnnnnnnnnnnnnnnnnnnnnnnnnnnnnnnnnnnnnnnnnnnnnnnnnnnnnnnnnnnnnnnnnnnnnnnnnnnnnnnnnnnnnnnnnnnnnnnnnnnnnnnnnnnnnnnnnnnnnnnnnnnnnnnnnnnnnnnnnnnnnnnnnnnnnnnnnnnnnnnnnnnnnnnnnnnnnnnnnnnnnnnnnnnnnnnnnnnnnnnnnnnnnnnnnnnnnnnnnnnnnnnnnnnnnnnnnnnnnnnnnnnnnnnnnnnnnnnnnnnnnnnnnnnnnnnnnnnnnnnnnnnnnnnnnnnnnnnnnnnnnnnnnnnnnnnnnnnnnnnnnnnnnnnnnnnnnnnnnnnnnnnnnnnnnnnnnnnnnnnnnnnnnnnnnnnnnnnnnnnnnnnnnnnnnnnnnnnnnnnnnnnnnnnnnnnnnnnnnnnnnnnnnnnnnnnnnnnnnnnnnnnnnnnnnnnnnnnnnnnnnnnnnnnnnnnnnnnnnnnnnnnnnnnnnnnnnnnnnnnnnnnnnnnnnnnnnnnnnnnnnnnnnnnnnnnnnnnnnnnnnnnnnnnnnnnnnnnnnnnnnnnnnnnnnnnnnnnnnnnnnnnnnnnnnnnnnnnnnnnnnnnnnnnnnnnnnnnnnnnnnnnnnnnnnnnnnnnnnnnnnnnnnnnnnnnnnnnnnnnnnnnnnnnnnnnnnnnnnnnnnnnnnnnnnnnnnnnnnnnnnnnnnnnnnnnnnnnnnnnnnnnnnnnnnnnnnnnnnnnnnnnnnnnnnnnnnnnnnnnnnnnnnnnnnnnnnnnnnnnnnnnnnnnnnnnnnnnnnnnnnnnnnnnnnnnnnnnnnnnnnnnnnnnnnnnnnnnnnnnnnnnnnnnnnnnnnnnnnnnnnnnnnnnnnnnnnnnnnnnnnnnnnnnnnnnnnnnnnnnnnnnnnnnnnnnnnnnnnnnnnnnnnnnnnnnnnnnnnnnnnnnnnnnnnnnnnnnnnnnnnnnnnnnnnnnnnnnnnnnnnnnnnnnnnnnnnnnnnnnnnnnnnnnnnnnnnnnnnnnnnnnnnnnnnnnnnnnnnnnnnnnnnnnnnnnnnnnnnnnnnnnnnnnnnnnnnnnnnnnnnnnnnnnnnnnnnnnnnnnnnnnnnnnnnnnnnnnnnnnnnnnnnnnnnnnnnnnnnnnnnnnnnnnnnnnnnnnnnnnnnnnnnnnnnnnnnnnnnnnnnnnnnnnnnnnnnnnnnnnnnnnnnnnnnnnnnnnnnnnnnnnnnnnnnnnnnnnnnnnnnnnnnnnnnnnnnnnnnnnnnnnnnnnnnnnnnnnnnnnnnnnnnnnnnnnnnnnnnnnnnnnnnnnnnnnnnnnnnnnnnnnnnnnnnnnnnnnnnnnnnnnnnnnnnnnnnnnnnnnnnnnnnnnnnnnnnnnnnnnnnnnnnnnnnnnnnnnnnnnnnnnnnnnnnnnnnnnnnnnnnnnnnnnnnnnnnnnnnnnnnnnnnnnnnnnnnnnnnnnnnnnnnnnnnnnnnnnnnnnnnnnnnnnnnnnnnnnnnnnnnnnnnnnnnnnnnnnnnnnnnnnnnnnnnnnnnnnnnnnnnnnnnnnnnnnnnnnnnnnnnnnnnnnnnnnnnnnnnnnnnnnnnnnnnnnnnnnnnnnnnnnnnnnnnnnnnnnnnnnnnnnnnnnnnnnnnnnnnnnnnnnnnnnnnnnnnnnnnnnnnnnnnnnnnnnnnnnnnnnnnnnnnnnnnnnnnnnnnnnnnnnnnnnnnnnnnnnnnnnnnnnnnnnnnnnnnnnnnnnnnnnnnnnnnnnnnnnnnnnnnnnnnnnnnnnnnnnnnnnnnnnnnnnnnnnnnnnnnnnnnnnnnnnnnnnnnnnnnnnnnnnnnnnnnnnnnnnnnnnnnnnnnnnnnnnnnnnnnnnnnnnnnnnnnnnnnnnnnnnnnnnnnnnnnnnnnnnnnnnnnnnnnnnnnnnnnnnnnnnnnnnnnnnnnnnnnnnnnnnnnnnnnnnnnnnnnnnnnnnnnnnnnnnnnnnnnnnnnnnnnnnnnnnnnnnnnnnnnnnnnnnnnnnnnnnnnnnnnnnnnnnnnnnnnnnnnnnnnnnnnnnnnnnnnnnnnnnnnnnnnnnnnnnnnnnnnnnnnnnnnnnnnnnnnnnnnnnnnnnnnnnnnnnnnnnnnnnnnnnnnnnnnnnnnnnnnnnnnnnnnnnnnnnnnnnnnnnnnnnnnnnnnnnnnnnnnnnnnnnnnnnnnnnnnnnnnnnnnnnnnnnnnnnnnnnnnnnnnnnnnnnnnnnnnnnnnnnnnnnnnnnnnnnnnnnnnnnnnnnnnnnnnnnnnnnnnnnnnnnnnnnnnnnnnnnnnnnnnnnnnnnnnnnnnnnnnnnnnnnnnnnnnnnnnnnnnnnnnnnnnnnnnnnnnnnnnnnnnnnnnnnnnnnnnnnnnnnnnnnnnnnnnnnnnnnnnnnnnnnnnnnnnnnnnnnnnnnnnnnnnnnnnnnnnnnnnnnnnnnnnnnnnnnnnnnnnnnnnnnnnnnnnnnnnnnnnnnnnnnnnnnnnnnnnnnnnnnnnnnnnnnnnnnnnnnnnnnnnnnnnnnnnnnnnnnnnnnnnnnnnnnnnnnnnnnnnnnnnnnnnnnnnnnnnnnnnnnnnnnnnnnnnnnnnnnnnnnnnnnnnnnnnnnnnnnnnnnnnnnnnnnnnnnnnnnnnnnnnnnnnnnnnnnnnnnnnnnnnnnnnnnnnnnnnnnnnnnnnnnnnnnnnnnnnnnnnnnnnnnnnnnnnnnnnnnnnnnnnnnnnnnnnnnnnnnnnnnnnnnnnnnnnnnnnnnnnnnnnnnnnnnnnnnnnnnnnnnnnnnnnnnnnnnnnnnnnnnnnnnnnnnnnnnnnnnnnnnnnnnnnnnnnnnnnnnnnnnnnnnnnnnnnnnnnnnnnnnnnnnnnnnnnnnnnnnnnnnnnnnnnnnnnnnnnnnnnnnnnnnnnnnnnnnnnnnnnnnnnnnnnnnnnnnnnnnnnnnnnnnnnnnnnnnnnnnnnnnnnnnnnnnnnnnnnnnnnnnnnnnnnnnnnnnnnnnnnnnnnnnnnnnnnnnnnnnnnnnnnnnnnnnnnnnnnnnnnnnnnnnnnnnnnnnnnnnnnnnnnnnnnnnnnnnnnnnnnnnnnnnnnnnnnnnnnnnnnnnnnnnnnnnnnnnnnnnnnnnnnnnnnnnnnnnnnnnnnnnnnnnnnnnnnnnnnnnnnnnnnnnnnnnnnnnnnnnnnnnnnnnnnnnnnnnnnnnnnnnnnnnnnnnnnnnnnnnnnnnnnnnnnnnnnnnnnnnnnnnnnnnnnnnnnnnnnnnnnnnnnnnnnnnnnnnnnnnnnnnnnnnnnnnnnnnnnnnnnnnnnnnnnnnnnnnnnnnnnnnnnnnnnnnnnnnnnnnnnnnnnnnnnnnnnnnnnnnnnnnnnnnnnnnnnnnnnnnnnnnnnnnnnnnnnnnnnnnnnnnnnnnnnnnnnnnnnnnnnnnnnnnnnnnnnnnnnnnnnnnnnnnnnnnnnnnnnnnnnnnnnnnnnnnnnnnnnnnnnnnnnnnnnnnnnnnnnnnnnnnnnnnnnnnnnnnnnnnnnnnnnnnnnnnnnnnnnnnnnnnnnnnnnnnnnnnnnnnnnnnnnnnnnnnnnnnnnnnnnnnnnnnnnnnnnnnnnnnnnnnnnnnnnnnnnnnnnnnnnnnnnnnnnnnnnnnnnnnnnnnnnnnnnnnnnnnnnnnnnnnnnnnnnnnnnnnnnnnnnnnnnnnnnnnnnnnnnnnnnnnnnnnnnnnnnnnnnnnnnnnnnnnnnnnnnnnnnnnnnnnnnnnnnnnnnnnnnnnnnnnnnnnnnnnnnnnnnnnnnnnnnnnnnnnnnnnnnnnnnnnnnnnnnnnnnnnnnnnnnnnnnnnnnnnnnnnnnnnnnnnnnnnnnnnnnnnnnnnnnnnnnnnnnnnnnnnnnnnnnnnnnnnnnnnnnnnnnnnnnnnnnnnnnnnnnnnnnnnnnnnnnnnnnnnnnnnnnnnnnnnnnnnnnnnnnnnnnnnnnnnnnnnnnnnnnnnnnnnnnnnnnnnnnnnnnnnnnnnnnnnnnnnnnnnnnnnnnnnnnnnnnnnnnnnnnnnnnnnnnnnnnnnnnnnnnnnnnnnnnnnnnnnnnnnnnnnnnnnnnnnnnnnnnnnnnnnnnnnnnnnnnnnnnnnnnnnnnnnnnnnnnnnnnnnnnnnnnnnnnnnnnnnnnnnnnnnnnnnnnnnnnnnnnnnnnnnnnnnnnnnnnnnnnnnnnnnnnnnnnnnnnnnnnnnnnnnnnnnnnnnnnnnnnnnnnnnnnnnnnnnnnnnnnnnnnnnnnnnnnnnnnnnnnnnnnnnnnnnnnnnnnnnnnnnnnnnnnnnnnnnnnnnnnnnnnnnnnnnnnnnnnnnnnnnnnnnnnnnnnnnnnnnnnnnnnnnnnnnnnnnnnnnnnnnnnnnnnnnnnnnnnnnnnnnnnnnnnnnnnnnnnnnnnnnnnnnnnnnnnnnnnnnnnnnnnnnnnnnnnnnnnnnnnnnnnnnnnnnnnnnnnnnnnnnnnnnnnnnnnnnnnnnnnnnnnnnnnnnnnnnnnnnnnnnnnnnnnnnnnnnnnnnnnnnnnnnnnnnnnnnnnnnnnnnnnnnnnnnnnnnnnnnnnnnnnnnnnnnnnnnnnnnnnnnnnnnnnnnnnnnnnnnnnnnnnnnnnnnnnnnnnnnnnnnnnnnnnnnnnnnnnnnnnnnnnnnnnnnnnnnnnnnnnnnnnnnnnnnnnnnnnnnnnnnnnnnnnnnnnnnnnnnnnnnnnnnnnnnnnnnnnnnnnnnnnnnnnnnnnnnnnnnnnnnnnnnnnnnnnnnnnnnnnnnnnnnnnnnnnnnnnnnnnnnnnnnnnnnnnnnnnnnnnnnnnnnnnnnnnnnnnnnnnnnnnnnnnnnnnnnnnnnnnnnnnnnnnnnnnnnnnnnnnnnnnnnnnnnnnnnnnnnnnnnnnnnnnnnnnnnnnnnnnnnnnnnnnnnnnnnnnnnnnnnnnnnnnnnnnnnnnnnnnnnnnnnnnnnnnnnnnnnnnnnnnnnnnnnnnnnnnnnnnnnnnnnnnnnnnnnnnnnnnnnnnnnnnnnnnnnnnnnnnnnnnnnnnnnnnnnnnnnnnnnnnnnnnnnnnnnnnnnnnnnnnnnnnnnnnnnnnnnnnnnnnnnnnnnnnnnnnnnnnnnnnnnnnnnnnnnnnnnnnnnnnnnnnnnnnnnnnnnnnnnnnnnnnnnnnnnnnnnnnnnnnnnnnnnnnnnnnnnnnnnnnnnnnnnnnnnnnnnnnnnnnnnnnnnnnnnnnnnnnnnnnnnnnnnnnnnnnnnnnnnnnnnnnnnnnnnnnnnnnnnnnnnnnnnnnnnnnnnnnnnnnnnnnnnnnnnnnnnnnnnnnnnnnnnnnnnnnnnnnnnnnnnnnnnnnnnnnnnnnnnnnnnnnnnnnnnnnnnnnnnnnnnnnnnnnnnnnnnnnnnnnnnnnnnnnnnnnnnnnnnnnnnnnnnnnnnnnnnnnnnnnnnnnnnnnnnnnnnnnnnnnnnnnnnnnnnnnnnnnnnnnnnnnnnnnnnnnnnnnnnnnnnnnnnnnnnnnnnnnnnnnnnnnnnnnnnnnnnnnnnnnnnnnnnnnnnnnnnnnnnnnnnnnnnnnnnnnnnnnnnnnnnnnnnnnnnnnnnnnnnnnnnnnnnnnnnnnnnnnnnnnnnnnnnnnnnnnnnnnnnnnnnnnnnnnnnnnnnnnnnnnnnnnnnnnnnnnnnnnnnnnnnnnnnnnnnnnnnnnnnnnnnnnnnnnnnnnnnnnnnnnnnnnnnnnnnnnnnnnnnnnnnnnnnnnnnnnnnnnnnnnnnnnnnnnnnnnnnnnnnnnnnnnnnnnnnnnnnnnnnnnnnnnnnnnnnnnnnnnnnnnnnnnnnnnnnnnnnnnnnnnnnnnnnnnnnnnnnnnnnnnnnnnnnnnnnnnnnnnnnnnnnnnnnnnnnnnnnnnnnnnnnnnnnnnnnnnnnnnnnnnnnnnnnnnnnnnnnnnnnnnnnnnnnnnnnnnnnnnnnnnnnnnnnnnnnnnnnnnnnnnnnnnnnnnnnnnnnnnnnnnnnnnnnnnnnnnnnnnnnnnnnnnnnnnnnnnnnnnnnnnnnnnnnnnnnnnnnnnnnnnnnnnnnnnnnnnnnnnnnnnnnnnnnnnnnnnnnnnnnnnnnnnnnnnnnnnnnnnnnnnnnnnnnnnnnnnnnnnnnnnnnnnnnnnnnnnnnnnnnnnnnnnnnnnnnnnnnnnnnnnnnnnnnnnnnnnnnnnnnnnnnnnnnnnnnnnnnnnnnnnnnnnnnnnnnnnnnnnnnnnnnnnnnnnnnnnnnnnnnnnnnnnnnnnnnnnnnnnnnnnnnnnnnnnnnnnnnnnnnnnnnnnnnnnnnnnnnnnnnnnnnnnnnnnnnnnnnnnnnnnnnnnnnnnnnnnnnnnnnnnnnnnnnnnnnnnnnnnnnnnnnnnnnnnnnnnnnnnnnnnnnnnnnnnnnnnnnnnnnnnnnnnnnnnnnnnnnnnnnnnnnnnnnnnnnnnnnnnnnnnnnnnnnnnnnnnnnnnnnnnnnnnnnnnnnnnnnnnnnnnnnnnnnnnnnnnnnnnnnnnnnnnnnnnnnnnnnnnnnnnnnnnnnnnnnnnnnnnnnnnnnnnnnnnnnnnnnnnnnnnnnnnnnnnnnnnnnnnnnnnnnnnnnnnnnnnnnnnnnnnnnnnnnnnnnnnnnnnnnnnnnnnnnnnnnnnnnnnnnnnnnnnnnnnnnnnnnnnnnnnnnnnnnnnnnnnnnnnnnnnnnnnnnnnnnnnnnnnnnnnnnnnnnnnnnnnnnnnnnnnnnnnnnnnnnnnnnnnnnnnnnnnnnnnnnnnnnnnnnnnnnnnnnnnnnnnnnnnnnnnnnnnnnnnnnnnnnnnnnnnnnnnnnnnnnnnnnnnnnnnnnnnnnnnnnnnnnnnnnnnnnnnnnnnnnnnnnnnnnnnnnnnnnnnnnnnnnnnnnnnnnnnnnnnnnnnnnnnnnnnnnnnnnnnnnnnnnnnnnnnnnnnnnnnnnnnnnnnnnnnnnnnnnnnnnnnnnnnnnnnnnnnnnnnnnnnnnnnnnnnnnnnnnnnnnnnnnnnnnnnnnnnnnnnnnnnnnnnnnnnnnnnnnnnnnnnnnnnnnnnnnnnnnnnnnnnnnnnnnnnnnnnnnnnnnnnnnnnnnnnnnnnnnnnnnnnnnnnnnnnnnnnnnnnnnnnnnnnnnnnnnnnnnnnnnnnnnnnnnnnnnnnnnnnnnnnnnnnnnnnnnnnnnnnnnnnnnnnnnnnnnnnnnnnnnnnnnnnnnnnnnnnnnnnnnnnnnnnnnnnnnnnnnnnnnnnnnnnnnnnnnnnnnnnnnnnnnnnnnnnnnnnnnnnnnnnnnnnnnnnnnnnnnnnnnnnnnnnnnnnnnnnnnnnnnnnnnnnnnnnnnnnnnnnnnnnnnnnnnnnnnnnnnnnnnnnnnnnnnnnnnnnnnnnnnnnnnnnnnnnnnnnnnnnnnnnnnnnnnnnnnnnnnnnnnnnnnnnnnnnnnnnnnnnnnnnnnnnnnnnnnnnnnnnnnnnnnnnnnnnnnnnnnnnnnnnnnnnnnnnnnnnnnnnnnnnnnnnnnnnnnnnnnnnnnnnnnnnnnnnnnnnnnnnnnnnnnnnnnnnnnnnnnnnnnnnnnnnnnnnnnnnnnnnnnnnnnnnnnnnnnnnnnnnnnnnnnnnnnnnnnnnnnnnnnnnnnnnnnnnnnnnnnnnnnnnnnnnnnnnnnnnnnnnnnnnnnnnnnnnnnnnnnnnnnnnnnnnnnnnnnnnnnnnnnnnnnnnnnnnnnnnnnnnnnnnnnnnnnnnnnnnnnnnnnnnnnnnnnnnnnnnnnnnnnnnnnnnnnnnnnnnnnnnnnnnnnnnnnnnnnnnnnnnnnnnnnnnnnnnnnnnnnnnnnnnnnnnnnnnnnnnnnnnnnnnnnnnnnnnnnnnnnnnnnnnnnnnnnnnnnnnnnnnnnnnnnnnnnnnnnnnnnnnnnnnnnnnnnnnnnnnnnnnnnnnnnnnnnnnnnnnnnnnnnnnnnnnnnnnnnnnnnnnnnnnnnnnnnnnnnnnnnnnnnnnnnnnnnnnnnnnnnnnnnnnnnnnnnnnnnnnnnnnnnnnnnnnnnnnnnnnnnnnnnnnnnnnnnnnnnnnnnnnnnnnnnnnnnnnnnnnnnnnnnnnnnnnnnnnnnnnnnnnnnnnnnnnnnnnnnnnnnnnnnnnnnnnnnnnnnnnnnnnnnnnnnnnnnnnnnnnnnnnnnnnnnnnnnnnnnnnnnnnnnnnnnnnnnnnnnnnnnnnnnnnnnnnnnnnnnnnnnnnnnnnnnnnnnnnnnnnnnnnnnnnnnnnnnnnnnnnnnnnnnnnnnnnnnnnnnnnnnnnnnnnnnnnnnnnnnnnnnnnnnnnnnnnnnnnnnnnnnnnnnnnnnnnnnnnnnnnnnnnnnnnnnnnnnnnnnnnnnnnnnnnnnnnnnnnnnnnnnnnnnnnnnnnnnnnnnnnnnnnnnnnnnnnnnnnnnnnnnnnnnnnnnnnnnnnnnnnnnnnnnnnnnnnnnnnnnnnnnnnnnnnnnnnnnnnnnnnnnnnnnnnnnnnnnnnnnnnnnnnnnnnnnnnnnnnnnnnnnnnnnnnnnnnnnnnnnnnnnnnnnnnnnnnnnnnnnnnnnnnnnnnnnnnnnnnnnnnnnnnnnnnnnnnnnnnnnnnnnnnnnnnnnnnnnnnnnnnnnnnnnnnnnnnnnnnnnnnnnnnnnnnnnnnnnnnnnnnnnnnnnnnnnnnnnnnnnnnnnnnnnnnnnnnnnnnnnnnnnnnnnnnnnnnnnnnnnnnnnnnnnnnnnnnnnnnnnnnnnnnnnnnnnnnnnnnnnnnnnnnnnnnnnnnnnnnnnnnnnnnnnnnnnnnnnnnnnnnnnnnnnnnnnnnnnnnnnnnnnnnnnnnnnnnnnnnnnnnnnnnnnnnnnnnnnnnnnnnnnnnnnnnnnnnnnnnnnnnnnnnnnnnnnnnnnnnnnnnnnnnnnnnnnnnnnnnnnnnnnnnnnnnnnnnnnnnnnnnnnnnnnnnnnnnnnnnnnnnnnnnnnnnnnnnnnnnnnnnnnnnnnnnnnnnnnnnnnnnnnnnnnnnnnnnnnnnnnnnnnnnnnnnnnnnnnnnnnnnnnnnnnnnnnnnnnnnnnnnnnnnnnnnnnnnnnnnnnnnnnnnnnnnnnnnnnnnnnnnnnnnnnnnnnnnnnnnnnnnnnnnnnnnnnnnnnnnnnnnnnnnnnnnnnnnnnnnnnnnnnnnnnnnnnnnnnnnnnnnnnnnnnnnnnnnnnnnnnnnnnnnnnnnnnnnnnnnnnnnnnnnnnnnnnnnnnnnnnnnnnnnnnnnnnnnnnnnnnnnnnnnnnnnnnnnnnnnnnnnnnnnnnnnnnnnnnnnnnnnnnnnnnnnnnnnnnnnnnnnnnnnnnnnnnnnnnnnnnnnnnnnnnnnnnnnnnnnnnnnnnnnnnnnnnnnnnnnnnnnnnnnnnnnnnnnnnnnnnnnnnnnnnnnnnnnnnnnnnnnnnnnnnnnnnnnnnnnnnnnnnnnnnnnnnnnnnnnnnnnnnnnnnnnnnnnnnnnnnnnnnnnnnnnnnnnnnnnnnnnnnnnnnnnnnnnnnnnnnnnnnnnnnnnnnnnnnnnnnnnnnnnnnnnnnnnnnnnnnnnnnnnnnnnnnnnnnnnnnnnnnnnnnnnnnnnnnnnnnnnnnnnnnnnnnnnnnnnnnnnnnnnnnnnnnnnnnnnnnnnnnnnnnnnnnnnnnnnnnnnnnnnnnnnnnnnnnnnnnnnnnnnnnnnnnnnnnnnnnnnnnnnnnnnnnnnnnnnnnnnnnnnnnnnnnnnnnnnnnnnnnnnnnnnnnnnnnnnnnnnnnnnnnnnnnnnnnnnnnnnnnnnnnnnnnnnnnnnnnnnnnnnnnnnnnnnnnnnnnnnnnnnnnnnnnnnnnnnnnnnnnnnnnnnnnnnnnnnnnnnnnnnnnnnnnnnnnnnnnnnnnnnnnnnnnnnnnnnnnnnnnnnnnnnnnnnnnnnnnnnnnnnnnnnnnnnnnnnnnnnnnnnnnnnnnnnnnnnnnnnnnnnnnnnnnnnnnnnnnnnnnnnnnnnnnnnnnnnnnnnnnnnnnnnnnnnnnnnnnnnnnnnnnnnnnnnnnnnnnnnnnnnnnnnnnnnnnnnnnnnnnnnnnnnnnnnnnnnnnnnnnnnnnnnnnnnnnnnnnnnnnnnnnnnnnnnnnnnnnnnnnnnnnnnnnnnnnnnnnnnnnnnnnnnnnnnnnnnnnnnnnnnnnnnnnnnnnnnnnnnnnnnnnnnnnnnnnnnnnnnnnnnnnnnnnnnnnnnnnnnnnnnnnnnnnnnnnnnnnnnnnnnnnnnnnnnnnnnnnnnnnnnnnnnnnnnnnnnnnnnnnnnnnnnnnnnnnnnnnnnnnnnnnnnnnnnnnnnnnnnnnnnnnnnnnnnnnnnnnnnnnnnnnnnnnnnnnnnnnnnnnnnnnnnnnnnnnnnnnnnnnnnnnnnnnnnnnnnnnnnnnnnnnnnnnnnnnnnnnnnnnnnnnnnnnnnnnnnnnnnnnnnnnnnnnnnnnnnnnnnnnnnnnnnnnnnnnnnnnnnnnnnnnnnnnnnnnnnnnnnnnnnnnnnnnnnnnnnnnnnnnnnnnnnnnnnnnnnnnnnnnnnnnnnnnnnnnnnnnnnnnnnnnnnnnnnnnnnnnnnnnnnnnnnnnnnnnnnnnnnnnnnnnnnnnnnnnnnnnnnnnnnnnnnnnnnnnnnnnnnnnnnnnnnnnnnnnnnnnnnnnnnnnnnnnnnnnnnnnnnnnnnnnnnnnnnnnnnnnnnnnnnnnnnnnnnnnnnnnnnnnnnnnnnnnnnnnnnnnnnnnnnnnnnnnnnnnnnnnnnnnnnnnnnnnnnnnnnnnnnnnnnnnnnnnnnnnnnnnnnnnnnnnnnnnnnnnnnnnnnnnnnnnnnnnnnnnnnnnnnnnnnnnnnnnnnnnnnnnnnnnnnnnnnnnnnnnnnnnnnnnnnnnnnnnnnnnnnnnnnnnnnnnnnnnnnnnnnnnnnnnnnnnnnnnnnnnnnnnnnnnnnnnnnnnnnnnnnnnnnnnnnnnnnnnnnnnnnnnnnnnnnnnnnnnnnnnnnnnnnnnnnnnnnnnnnnnnnnnnnnnnnnnnnnnnnnnnnnnnnnnnnnnnnnnnnnnnnnnnnnnnnnnnnnnnnnnnnnnnnnnnnnnnnnnnnnnnnnnnnnnnnnnnnnnnnnnnnnnnnnnnnnnnnnnnnnnnnnnnnnnnnnnnnnnnnnnnnnnnnnnnnnnnnnnnnnnnnnnnnnnnnnnnnnnnnnnnnnnnnnnnnnnnnnnnnnnnnnnnnnnnnnnnnnnnnnnnnnnnnnnnnnnnnnnnnnnnnnnnnnnnnnnnnnnnnnnnnnnnnnnnnnnnnnnnnnnnnnnnnnnnnnnnnnnnnnnnnnnnnnnnnnnnnnnnnnnnnnnnnnnnnnnnnnnnnnnnnnnnnnnnnnnnnnnnnnnnnnnnnnnnnnnnnnnnnnnnnnnnnnnnnnnnnnnnnnnnnnnnnnnnnnnnnnnnnnnnnnnnnnnnnnnnnnnnnnnnnnnnnnnnnnnnnnnnnnnnnnnnnnnnnnnnnnnnnnnnnnnnnnnnnnnnnnnnnnnnnnnnnnnnnnnnnnnnnnnnnnnnnnnnnnnnnnnnnnnnnnnnnnnnnnnnnnnnnnnnnnnnnnnnnnnnnnnnnnnnnnnnnnnnnnnnnnnnnnnnnnnnnnnnnnnnnnnnnnnnnnnnnnnnnnnnnnnnnnnnnnnnnnnnnnnnnnnnnnnnnnnnnnnnnnnnnnnnnnnnnnnnnnnnnnnnnnnnnnnnnnnnnnnnnnnnnnnnnnnnnnnnnnnnnnnnnnnnnnnnnnnnnnnnnnnnnnnnnnnnnnnnnnnnnnnnnnnnnnnnnnnnnnnnnnnnnnnnnnnnnnnnnnnnnnnnnnnnnnnnnnnnnnnnnnnnnnnnnnnnnnnnnnnnnnnnnnnnnnnnnnnnnnnnnnnnnnnnnnnnnnnnnnnnnnnnnnnnnnnnnnnnnnnnnnnnnnnnnnnnnnnnnnnnnnnnnnnnnnnnnnnnnnnnnnnnnnnnnnnnnnnnnnnnnnnnnnnnnnnnnnnnnnnnnnnnnnnnnnnnnnnnnnnnnnnnnnnnnnnnnnnnnnnnnnnnnnnnnnnnnnnnnnnnnnnnnnnnnnnnnnnnnnnnnnnnnnnnnnnnnnnnnnnnnnnnnnnnnnnnnnnnnnnnnnnnnnnnnnnnnnnnnnnnnnnnnnnnnnnnnnnnnnnnnnnnnnnnnnnnnnnnnnnnnnnnnnnnnnnnnnnnnnnnnnnnnnnnnnnnnnnnnnnnnnnnnnnnnnnnnnnnnnnnnnnnnnnnnnnnnnnnnnnnnnnnnnnnnnnnnnnnnnnnnnnnnnnnnnnnnnnnnnnnnnnnnnnnnnnnnnnnnnnnnnnnnnnnnnnnnnnnnnnnnnnnnnnnnnnnnnnnnnnnnnnnnnnnnnnnnnnnnnnnnnnnnnnnnnnnnnnnnnnnnnnnnnnnnnnnnnnnnnnnnnnnnnnnnnnnnnnnnnnnnnnnnnnnnnnnnnnnnnnnnnnnnnnnnnnnnnnnnnnnnnnnnnnnnnnnnnnnnnnnnnnnnnnnnnnnnnnnnnnnnnnnnnnnnnnnnnnnnnnnnnnnnnnnnnnnnnnnnnnnnnnnnnnnnnnnnnnnnnnnnnnnnnnnnnnnnnnnnnnnnnnnnnnnnnnnnnnnnnnnnnnnnnnnnnnnnnnnnnnnnnnnnnnnnnnnnnnnnnnnnnnnnnnnnnnnnnnnnnnnnnnnnnnnnnnnnnnnnnnnnnnnnnnnnnnnnnnnnnnnnnnnnnnnnnnnnnnnnnnnnnnnnnnnnnnnnnnnnnnnnnnnnnnnnnnnnnnnnnnnnnnnnnnnnnnnnnnnnnnnnnnnnnnnnnnnnnnnnnnnnnnnnnnnnnnnnnnnnnnnnnnnnnnnnnnnnnnnnnnnnnnnnnnnnnnnnnnnnnnnnnnnnnnnnnnnnnnnnnnnnnnnnnnnnnnnnnnnnnnnnnnnnnnnnnnnnnnnnnnnnnnnnnnnnnnnnnnnnnnnnnnnnnnnnnnnnnnnnnnnnnnnnnnnnnnnnnnnnnnnnnnnnnnnnnnnnnnnnnnnnnnnnnnnnnnnnnnnnnnnnnnnnnnnnnnnnnnnnnnnnnnnnnnnnnnnnnnnnnnnnnnnnnnnnnnnnnnnnnnnnnnnnnnnnnnnnnnnnnnnnnnnnnnnnnnnnnnnnnnnnnnnnnnnnnnnnnnnnnnnnnnnnnnnnnnnnnnnnnnnnnnnnnnnnnnnnnnnnnnnnnnnnnnnnnnnnnnnnnnnnnnnnnnnnnnnnnnnnnnnnnnnnnnnnnnnnnnnnnnnnnnnnnnnnnnnnnnnnnnnnnnnnnnnnnnnnnnnnnnnnnnnnnnnnnnnnnnnnnnnnnnnnnnnnnnnnnnnnnnnnnnnnnnnnnnnnnnnnnnnnnnnnnnnnnnnnnnnnnnnnnnnnnnnnnnnnnnnnnnnnnnnnnnnnnnnnnnnnnnnnnnnnnnnnnnnnnnnnnnnnnnnnnnnnnnnnnnnnnnnnnnnnnnnnnnnnnnnnnnnnnnnnnnnnnnnnnnnnnnnnnnnnnnnnnnnnnnnnnnnnnnnnnnnnnnnnnnnnnnnnnnnnnnnnnnnnnnnnnnnnnnnnnnnnnnnnnnnnnnnnnnnnnnnnnnnnnnnnnnnnnnnnnnnnnnnnnnnnnnnnnnnnnnnnnnnnnnnnnnnnnnnnnnnnnnnnnnnnnnnnnnnnnnnnnnnnnnnnnnnnnnnnnnnnnnnnnnnnnnnnnnnnnnnnnnnnnnnnnnnnnnnnnnnnnnnnnnnnnnnnnnnnnnnnnnnnnnnnnnnnnnnnnnnnnnnnnnnnnnnnnnnnnnnnnnnnnnnnnnnnnnnnnnnnnnnnnnnnnnnnnnnnnnnnnnnnnnnnnnnnnnnnnnnnnnnnnnnnnnnnnnnnnnnnnnnnnnnnnnnnnnnnnnnnnnnnnnnnnnnnnnnnnnnnnnnnnnnnnnnnnnnnnnnnnnnnnnnnnnnnnnnnnnnnnnnnnnnnnnnnnnnnnnnnnnnnnnnnnnnnnnnnnnnnnnnnnnnnnnnnnnnnnnnnnnnnnnnnnnnnnnnnnnnnnnnnnnnnnnnnnnnnnnnnnnnnnnnnnnnnnnnnnnnnnnnnnnnnnnnnnnnnnnnnnnnnnnnnnnnnnnnnnnnnnnnnnnnnnnnnnnnnnnnnnnnnnnnnnnnnnnnnnnnnnnnnnnnnnnnnnnnnnnnnnnnnnnnnnnnnnnnnnnnnnnnnnnnnnnnnnnnnnnnnnnnnnnnnnnnnnnnnnnnnnnnnnnnnnnnnnnnnnnnnnnnnnnnnnnnnnnnnnnnnnnnnnnnnnnnnnnnnnnnnnnnnnnnnnnnnnnnnnnnnnnnnnnnnnnnnnnnnnnnnnnnnnnnnnnnnnnnnnnnnnnnnnnnnnnnnnnnnnnnnnnnnnnnnnnnnnnnnnnnnnnnnnnnnnnnnnnnnnnnnnnnnnnnnnnnnnnnnnnnnnnnnnnnnnnnnnnnnnnnnnnnnnnnnnnnnnnnnnnnnnnnnnnnnnnnnnnnnnnnnnnnnnnnnnnnnnnnnnnnnnnnnnnnnnnnnnnnnnnnnnnnnnnnnnnnnnnnnnnnnnnnnnnnnnnnnnnnnnnnnnnnnnnnnnnnnnnnnnnnnnnnnnnnnnnnnnnnnnnnnnnnnnnnnnnnnnnnnnnnnnnnnnnnnnnnnnnnnnnnnnnnnnnnnnnnnnnnnnnnnnnnnnnnnnnnnnnnnnnnnnnnnnnnnnnnnnnnnnnnnnnnnnnnnnnnnnnnnnnnnnnnnnnnnnnnnnnnnnnnnnnnnnnnnnnnnnnnnnnnnnnnnnnnnnnnnnnnnnnnnnnnnnnnnnnnnnnnnnnnnnnnnnnnnnnnnnnnnnnnnnnnnnnnnnnnnnnnnnnnnnnnnnnnnnnnnnnnnnnnnnnnnnnnnnnnnnnnnnnnnnnnnnnnnnnnnnnnnnnnnnnnnnnnnnnnnnnnnnnnnnnnnnnnnnnnnnnnnnnnnnnnnnnnnnnnnnnnnnnnnnnnnnnnnnnnnnnnnnnnnnnnnnnnnnnnnnnnnnnnnnnnnnnnnnnnnnnnnnnnnnnnnnnnnnnnnnnnnnnnnnnnnnnnnnnnnnnnnnnnnnnnnnnnnnnnnnnnnnnnnnnnnnnnnnnnnnnnnnnnnnnnnnnnnnnnnnnnnnnnnnnnnnnnnnnnnnnnnnnnnnnnnnnnnnnnnnnnnnnnnnnnnnnnnnnnnnnnnnnnnnnnnnnnnnnnnnnnnnnnnnnnnnnnnnnnnnnnnnnnnnnnnnnnnnnnnnnnnnnnnnnnnnnnnnnnnnnnnnnnnnnnnnnnnnnnnnnnnnnnnnnnnnnnnnnnnnnnnnnnnnnnnnnnnnnnnnnnnnnnnnnnnnnnnnnnnnnnnnnnnnnnnnnnnnnnnnnnnnnnnnnnnnnnnnnnnnnnnnnnnnnnnnnnnnnnnnnnnnnnnnnnnnnnnnnnnnnnnnnnnnnnnnnnnnnnnnnnnnnnnnnnnnnnnnnnnnnnnnnnnnnnnnnnnnnnnnnnnnnnnnnnnnnnnnnnnnnnnnnnnnnnnnnnnnnnnnnnnnnnnnnnnnnnnnnnnnnnnnnnnnnnnnnnnnnnnnnnnnnnnnnnnnnnnnnnnnnnnnnnnnnnnnnnnnnnnnnnnnnnnnnnnnnnnnnnnnnnnnnnnnnnnnnnnnnnnnnnnnnnnnnnnnnnnnnnnnnnnnnnnnnnnnnnnnnnnnnnnnnnnnnnnnnnnnnnnnnnnnnnnnnnnnnnnnnnnnnnnnnnnnnnnnnnnnnnnnnnnnnnnnnnnnnnnnnnnnnnnnnnnnnnnnnnnnnnnnnnnnnnnnnnnnnnnnnnnnnnnnnnnnnnnnnnnnnnnnnnnnnnnnnnnnnnnnnnnnnnnnnnnnnnnnnnnnnnnnnnnnnnnnnnnnnnnnnnnnnnnnnnnnnnnnnnnnnnnnnnnnnnnnnnnnnnnnnnnnnnnnnnnnnnnnnnnnnnnnnnnnnnnnnnnnnnnnnnnnnnnnnnnnnnnnnnnnnnnnnnnnnnnnnnnnnnnnnnnnnnnnnnnnnnnnnnnnnnnnnnnnnnnnnnnnnnnnnnnnnnnnnnnnnnnnnnnnnnnnnnnnnnnnnnnnnnnnnnnnnnnnnnnnnnnnnnnnnnnnnnnnnnnnnnnnnnnnnnnnnnnnnnnnnnnnnnnnnnnnnnnnnnnnnnnnnnnnnnnnnnnnnnnnnnnnnnnnnnnnnnnnnnnnnnnnnnnnnnnnnnnnnnnnnnnnnnnnnnnnnnnnnnnnnnnnnnnnnnnnnnnnnnnnnnnnnnnnnnnnnnnnnnnnnnnnnnnnnnnnnnnnnnnnnnnnnnnnnnnnnnnnnnnnnnnnnnnnnnnnnnnnnnnnnnnnnnnnnnnnnnnnnnnnnnnnnnnnnnnnnnnnnnnnnnnnnnnnnnnnnnnnnnnnnnnnnnnnnnnnnnnnnnnnnnnnnnnnnnnnnnnnnnnnnnnnnnnnnnnnnnnnnnnnnnnnnnnnnnnnnnnnnnnnnnnnnnnnnnnnnnnnnnnnnnnnnnnnnnnnnnnnnnnnnnnnnnnnnnnnnnnnnnnnnnnnnnnnnnnnnnnnnnnnnnnnnnnnnnnnnnnnnnnnnnnnnnnnnnnnnnnnnnnnnnnnnnnnnnnnnnnnnnnnnnnnnnnnnnnnnnnnnnnnnnnnnnnnnnnnnnnnnnnnnnnnnnnnnnnnnnnnnnnnnnnnnnnnnnnnnnnnnnnnnnnnnnnnnnnnnnnnnnnnnnnnnnnnnnnnnnnnnnnnnnnnnnnnnnnnnnnnnnnnnnnnnnnnnnnnnnnnnnnnnnnnnnnnnnnnnnnnnnnnnnnnnnnnnnnnnnnnnnnnnnnnnnnnnnnnnnnnnnnnnnnnnnnnnnnnnnnnnnnnnnnnnnnnnnnnnnnnnnnnnnnnnnnnnnnnnnnnnnnnnnnnnnnnnnnnnnnnnnnnnnnnnnnnnnnnnnnnnnnnnnnnnnnnnnnnnnnnnnnnnnnnnnnnnnnnnnnnnnnnnnnnnnnnnnnnnnnnnnnnnnnnnnnnnnnnnnnnnnnnnnnnnnnnnnnnnnnnnnnnnnnnnnnnnnnnnnnnnnnnnnnnnnnnnnnnnnnnnnnnnnnnnnnnnnnnnnnnnnnnnnnnnnnnnnnnnnnnnnnnnnnnnnnnnnnnnnnnnnnnnnnnnnnnnnnnnnnnnnnnnnnnnnnnnnnnnnnnnnnnnnnnnnnnnnnnnnnnnnnnnnnnnnnnnnnnnnnnnnnnnnnnnnnnnnnnnnnnnnnnnnnnnnnnnnnnnnnnnnnnnnnnnnnnnnnnnnnnnnnnnnnnnnnnnnnnnnnnnnnnnnnnnnnnnnnnnnnnnnnnnnnnnnnnnnnnnnnnnnnnnnnnnnnnnnnnnnnnnnnnnnnnnnnnnnnnnnnnnnnnnnnnnnnnnnnnnnnnnnnnnnnnnnnnnnnnnnnnnnnnnnnnnnnnnnnnnnnnnnnnnnnnnnnnnnnnnnnnnnnnnnnnnnnnnnnnnnnnnnnnnnnnnnnnnnnnnnnnnnnnnnnnnnnnnnnnnnnnnnnnnnnnnnnnnnnnnnnnnnnnnnnnnnnnnnnnnnnnnnnnnnnnnnnnnnnnnnnnnnnnnnnnnnnnnnnnnnnnnnnnnnnnnnnnnnnnnnnnnnnnnnnnnnnnnnnnnnnnnnnnnnnnnnnnnnnnnnnnnnnnnnnnnnnnnnnnnnnnnnnnnnnnnnnnnnnnnnnnnnnnnnnnnnnnnnnnnnnnnnnnnnnnnnnnnnnnnnnnnnnnnnnnnnnnnnnnnnnnnnnnnnnnnnnnnnnnnnnnnnnnnnnnnnnnnnnnnnnnnnnnnnnnnnnnnnnnnnnnnnnnnnnnnnnnnnnnnnnnnnnnnnnnnnnnnnnnnnnnnnnnnnnnnnnnnnnnnnnnnnnnnnnnnnnnnnnnnnnnnnnnnnnnnnnnnnnnnnnnnnnnnnnnnnnnnnnnnnnnnnnnnnnnnnnnnnnnnnnnnnnnnnnnnnnnnnnnnnnnnnnnnnnnnnnnnnnnnnnnnnnnnnnnnnnnnnnnnnnnnnnnnnnnnnnnnnnnnnnnnnnnnnnnnnnnnnnnnnnnnnnnnnnnnnnnnnnnnnnnnnnnnnnnnnnnnnnnnnnnnnnnnnnnnnnnnnnnnnnnnnnnnnnnnnnnnnnnnnnnnnnnnnnnnnnnnnnnnnnnnnnnnnnnnnnnnnnnnnnnnnnnnnnnnnnnnnnnnnnnnnnnnnnnnnnnnnnnnnnnnnnnnnnnnnnnnnnnnnnnnnnnnnnnnnnnnnnnnnnnnnnnnnnnnnnnnnnnnnnnnnnnnnnnnnnnnnnnnnnnnnnnnnnnnnnnnnnnnnnnnnnnnnnnnnnnnnnnnnnnnnnnnnnnnnnnnnnnnnnnnnnnnnnnnnnnnnnnnnnnnnnnnnnnnnnnnnnnnnnnnnnnnnnnnnnnnnnnnnnnnnnnnnnnnnnnnnnnnnnnnnnnnnnnnnnnnnnnnnnnnnnnnnnnnnnnnnnnnnnnnnnnnnnnnnnnnnnnnnnnnnnnnnnnnnnnnnnnnnnnnnnnnnnnnnnnnnnnnnnnnnnnnnnnnnnnnnnnnnnnnnnnnnnnnnnnnnnnnnnnnnnnnnnnnnnnnnnnnnnnnnnnnnnnnnnnnnnnnnnnnnnnnnnnnnnnnnnnnnnnnnnnnnnnnnnnnnnnnnnnnnnnnnnnnnnnnnnnnnnnnnnnnnnnnnnnnnnnnnnnnnnnnnnnnnnnnnnnnnnnnnnnnnnnnnnnnnnnnnnnnnnnnnnnnnnnnnnnnnnnnnnnnnnnnnnnnnnnnnnnnnnnnnnnnnnnnnnnnnnnnnnnnnnnnnnnnnnnnnnnnnnnnnnnnnnnnnnnnnnnnnnnnnnnnnnnnnnnnnnnnnnnnnnnnnnnnnnnnnnnnnnnnnnnnnnnnnnnnnnnnnnnnnnnnnnnnnnnnnnnnnnnnnnnnnnnnnnnnnnnnnnnnnnnnnnnnnnnnnnnnnnnnnnnnnnnnnnnnnnnnnnnnnnnnnnnnnnnnnnnnnnnnnnnnnnnnnnnnnnnnnnnnnnnnnnnnnnnnnnnnnnnnnnnnnnnnnnnnnnnnnnnnnnnnnnnnnnnnnnnnnnnnnnnnnnnnnnnnnnnnnnnnnnnnnnnnnnnnnnnnnnnnnnnnnnnnnnnnnnnnnnnnnnnnnnnnnnnnnnnnnnnnnnnnnnnnnnnnnnnnnnnnnnnnnnnnnnnnnnnnnnnnnnnnnnnnnnnnnnnnnnnnnnnnnnnnnnnnnnnnnnnnnnnnnnnnnnnnnnnnnnnnnnnnnnnnnnnnnnnnnnnnnnnnnnnnnnnnnnnnnnnnnnnnnnnnnnnnnnnnnnnnnnnnnnnnnnnnnnnnnnnnnnnnnnnnnnnnnnnnnnnnnnnnnnnnnnnnnnnnnnnnnnnnnnnnnnnnnnnnnnnnnnnnnnnnnnnnnnnnnnnnnnnnnnnnnnnnnnnnnnnnnnnnnnnnnnnnnnnnnnnnnnnnnnnnnnnnnnnnnnnnnnnnnnnnnnnnnnnnnnnnnnnnnnnnnnnnnnnnnnnnnnnnnnnnnnnnnnnnnnnnnnnnnnnnnnnnnnnnnnnnnnnnnnnnnnnnnnnnnnnnnnnnnnnnnnnnnnnnnnnnnnnnnnnnnnnnnnnnnnnnnnnnnnnnnnnnnnnnnnnnnnnnnnnnnnnnnnnnnnnnnnnnnnnnnnnnnnnnnnnnnnnnnnnnnnnnnnnnnnnnnnnnnnnnnnnnnnnnnnnnnnnnnnnnnnnnnnnnnnnnnnnnnnnnnnnnnnnnnnnnnnnnnnnnnnnnnnnnnnnnnnnnnnnnnnnnnnnnnnnnnnnnnnnnnnnnnnnnnnnnnnnnnnnnnnnnnnnnnnnnnnnnnnnnnnnnnnnnnnnnnnnnnnnnnnnnnnnnnnnnnnnnnnnnnnnnnnnnnnnnnnnnnnnnnnnnnnnnnnnnnnnnnnnnnnnnnnnnnnnnnnnnnnnnnnnnnnnnnnnnnnnnnnnnnnnnnnnnnnnnnnnnnnnnnnnnnnnnnnnnnnnnnnnnnnnnnnnnnnnnnnnnnnnnnnnnnnnnnnnnnnnnnnnnnnnnnnnnnnnnnnnnnnnnnnnnnnnnnnnnnnnnnnnnnnnnnnnnnnnnnnnnnnnnnnnnnnnnnnnnnnnnnnnnnnnnnnnnnnnnnnnnnnnnnnnnnnnnnnnnnnnnnnnnnnnnnnnnnnnnnnnnnnnnnnnnnnnnnnnnnnnnnnnnnnnnnnnnnnnnnnnnnnnnnnnnnnnnnnnnnnnnnnnnnnnnnnnnnnnnnnnnnnnnnnnnnnnnnnnnnnnnnnnnnnnnnnnnnnnnnnnnnnnnnnnnnnnnnnnnnnnnnnnnnnnnnnnnnnnnnnnnnnnnnnnnnnnnnnnnnnnnnnnnnnnnnnnnnnnnnnnnnnnnnnnnnnnnnnnnnnnnnnnnnnnnnnnnnnnnnnnnnnnnnnnnnnnnnnnnnnnnnnnnnnnnnnnnnnnnnnnnnnnnnnnnnnnnnnnnnnnnnnnnnnnnnnnnnnnnnnnnnnnnnnnnnnnnnnnnnnnnnnnnnnnnnnnnnnnnnnnnnnnnnnnnnnnnnnnnnnnnnnnnnnnnnnnnnnnnnnnnnnnnnnnnnnnnnnnnnnnnnnnnnnnnnnnnnnnnnnnnnnnnnnnnnnnnnnnnnnnnnnnnnnnnnnnnnnnnnnnnnnnnnnnnnnnnnnnnnnnnnnnnnnnnnnnnnnnnnnnnnnnnnnnnnnnnnnnnnnnnnnnnnnnnnnnnnnnnnnnnnnnnnnnnnnnnnnnnnnnnnnnnnnnnnnnnnnnnnnnnnnnnnnnnnnnnnnnnnnnnnnnnnnnnnnnnnnnnnnnnnnnnnnnnnnnnnnnnnnnnnnnnnnnnnnnnnnnnnnnnnnnnnnnnnnnnnnnnnnnnnnnnnnnnnnnnnnnnnnnnnnnnnnnnnnnnnnnnnnnnnnnnnnnnnnnnnnnnnnnnnnnnnnnnnnnnnnnnnnnnnnnnnnnnnnnnnnnnnnnnnnnnnnnnnnnnnnnnnnnnnnnnnnnnnnnnnnnnnnnnnnnnnnnnnnnnnnnnnnnnnnnnnnnnnnnnnnnnnnnnnnnnnnnnnnnnnnnnnnnnnnnnnnnnnnnnnnnnnnnnnnnnnnnnnnnnnnnnnnnnnnnnnnnnnnnnnnnnnnnnnnnnnnnnnnnnnnnnnnnnnnnnnnnnnnnnnnnnnnnnnnnnnnnnnnnnnnnnnnnnnnnnnnnnnnnnnnnnnnnnnnnnnnnnnnnnnnnnnnnnnnnnnnnnnnnnnnnnnnnnnnnnnnnnnnnnnnnnnnnnnnnnnnnnnnnnnnnnnnnnnnnnnnnnnnnnnnnnnnnnnnnnnnnnnnnnnnnnnnnnnnnnnnnnnnnnnnnnnnnnnnnnnnnnnnnnnnnnnnnnnnnnnnnnnnnnnnnnnnnnnnnnnnnnnnnnnnnnnnnnnnnnnnnnnnnnnnnnnnnnnnnnnnnnnnnnnnnnnnnnnnnnnnnnnnnnnnnnnnnnnnnnnnnnnnnnnnnnnnnnnnnnnnnnnnnnnnnnnnnnnnnnnnnnnnnnnnnnnnnnnnnnnnnnnnnnnnnnnnnnnnnnnnnnnnnnnnnnnnnnnnnnnnnnnnnnnnnnnnnnnnnnnnnnnnnnnnnnnnnnnnnnnnnnnnnnnnnnnnnnnnnnnnnnnnnnnnnnnnnnnnnnnnnnnnnnnnnnnnnnnnnnnnnnnnnnnnnnnnnnnnnnnnnnnnnnnnnnnnnnnnnnnnnnnnnnnnnnnnnnnnnnnnnnnnnnnnnnnnnnnnnnnnnnnnnnnnnnnnnnnnnnnnnnnnnnnnnnnnnnnnnnnnnnnnnnnnnnnnnnnnnnnnnnnnnnnnnnnnnnnnnnnnnnnnnnnnnnnnnnnnnnnnnnnnnnnnnnnnnnnnnnnnnnnnnnnnnnnnnnnnnnnnnnnnnnnnnnnnnnnnnnnnnnnnnnnnnnnnnnnnnnnnnnnnnnnnnnnnnnnnnnnnnnnnnnnnnnnnnnnnnnnnnnnnnnnnnnnnnnnnnnnnnnnnnnnnnnnnnnnnnnnnnnnnnnnnnnnnnnnnnnnnnnnnnnnnnnnnnnnnnnnnnnnnnnnnnnnnnnnnnnnnnnnnnnnnnnnnnnnnnnnnnnnnnnnnnnnnnnnnnnnnnnnnnnnnnnnnnnnnnnnnnnnnnnnnnnnnnnnnnnnnnnnnnnnnnnnnnnnnnnnnnnnnnnnnnnnnnnnnnnnnnnnnnnnnnnnnnnnnnnnnnnnnnnnnnnnnnnnnnnnnnnnnnnnnnnnnnnnnnnnnnnnnnnnnnnnnnnnnnnnnnnnnnnnnnnnnnnnnnnnnnnnnnnnnnnnnnnnnnnnnnnnnnnnnnnnnnnnnnnnnnnnnnnnnnnnnnnnnnnnnnnnnnnnnnnnnnnnnnnnnnnnnnnnnnnnnnnnnnnnnnnnnnnnnnnnnnnnnnnnnnnnnnnnnnnnnnnnnnnnnnnnnnnnnnnnnnnnnnnnnnnnnnnnnnnnnnnnnnnnnnnnnnnnnnnnnnnnnnnnnnnnnnnnnnnnnnnnnnnnnnnnnnnnnnnnnnnnnnnnnnnnnnnnnnnnnnnnnnnnnnnnnnnnnnnnnnnnnnnnnnnnnnnnnnnnnnnnnnnnnnnnnnnnnnnnnnnnnnnnnnnnnnnnnnnnnnnnnnnnnnnnnnnnnnnnnnnnnnnnnnnnnnnnnnnnnnnnnnnnnnnnnnnnnnnnnnnnnnnnnnnnnnnnnnnnnnnnnnnnnnnnnnnnnnnnnnnnnnnnnnnnnnnnnnnnnnnnnnnnnnnnnnnnnnnnnnnnnnnnnnnnnnnnnnnnnnnnnnnnnnnnnnnnnnnnnnnnnnnnnnnnnnnnnnnnnnnnnnnnnnnnnnnnnnnnnnnnnnnnnnnnnnnnnnnnnnnnnnnnnnnnnnnnnnnnnnnnnnnnnnnnnnnnnnnnnnnnnnnnnnnnnnnnnnnnnnnnnnnnnnnnnnnnnnnnnnnnnnnnnnnnnnnnnnnnnnnnnnnnnnnnnnnnnnnnnnnnnnnnnnnnnnnnnnnnnnnnnnnnnnnnnnnnnnnnnnnnnnnnnnnnnnnnnnnnnnnnnnnnnnnnnnnnnnnnnnnnnnnnnnnnnnnnnnnnnnnnnnnnnnnnnnnnnnnnnnnnnnnnnnnnnnnnnnnnnnnnnnnnnnnnnnnnnnnnnnnnnnnnnnnnnnnnnnnnnnnnnnnnnnnnnnnnnnnnnnnnnnnnnnnnnnnnnnnnnnnnnnnnnnnnnnnnnnnnnnnnnnnnnnnnnnnnnnnnnnnnnnnnnnnnnnnnnnnnnnnnnnnnnnnnnnnnnnnnnnnnnnnnnnnnnnnnnnnnnnnnnnnnnnnnnnnnnnnnnnnnnnnnnnnnnnnnnnnnnnnnnnnnnnnnnnnnnnnnnnnnnnnnnnnnnnnnnnnnnnnnnnnnnnnnnnnnnnnnnnnnnnnnnnnnnnnnnnnnnnnnnnnnnnnnnnnnnnnnnnnnnnnnnnnnnnnnnnnnnnnnnnnnnnnnnnnnnnnnnnnnnnnnnnnnnnnnnnnnnnnnnnnnnnnnnnnnnnnnnnnnnnnnnnnnnnnnnnnnnnnnnnnnnnnnnnnnnnnnnnnnnnnnnnnnnnnnnnnnnnnnnnnnnnnnnnnnnnnnnnnnnnnnnnnnnnnnnnnnnnnnnnnnnnnnnnnnnnnnnnnnnnnnnnnnnnnnnnnnnnnnnnnnnnnnnnnnnnnnnnnnnnnnnnnnnnnnnnnnnnnnnnnnnnnnnnnnnnnnnnnnnnnnnnnnnnnnnnnnnnnnnnnnnnnnnnnnnnnnnnnnnnnnnnnnnnnnnnnnnnnnnnnnnnnnnnnnnnnnnnnnnnnnnnnnnnnnnnnnnnnnnnnnnnnnnnnnnnnnnnnnnnnnnnnnnnnnnnnnnnnnnnnnnnnnnnnnnnnnnnnnnnnnnnnnnnnnnnnnnnnnnnnnnnnnnnnnnnnnnnnnnnnnnnnnnnnnnnnnnnnnnnnnnnnnnnnnnnnnnnnnnnnnnnnnnnnnnnnnnnnnnnnnnnnnnnnnnnnnnnnnnnnnnnnnnnnnnnnnnnnnnnnnnnnnnnnnnnnnnnnnnnnnnnnnnnnnnnnnnnnnnnnnnnnnnnnnnnnnnnnnnnnnnnnnnnnnnnnnnnnnnnnnnnnnnnnnnnnnnnnnnnnnnnnnnnnnnnnnnnnnnnnnnnnnnnnnnnnnnnnnnnnnnnnnnnnnnnnnnnnnnnnnnnnnnnnnnnnnnnnnnnnnnnnnnnnnnnnnnnnnnnnnnnnnnnnnnnnnnnnnnnnnnnnnnnnnnnnnnnnnnnnnnnnnnnnnnnnnnnnnnnnnnnnnnnnnnnnnnnnnnnnnnnnnnnnnnnnnnnnnnnnnnnnnnnnnnnnnnnnnnnnnnnnnnnnnnnnnnnnnnnnnnnnnnnnnnnnnnnnnnnnnnnnnnnnnnnnnnnnnnnnnnnnnnnnnnnnnnnnnnnnnnnnnnnnnnnnnnnnnnnnnnnnnnnnnnnnnnnnnnnnnnnnnnnnnnnnnnnnnnnnnnnnnnnnnnnnnnnnnnnnnnnnnnnnnnnnnnnnnnnnnnnnnnnnnnnnnnnnnnnnnnnnnnnnnnnnnnnnnnnnnnnnnnnnnnnnnnnnnnnnnnnnnnnnnnnnnnnnnnnnnnnnnnnnnnnnnnnnnnnnnnnnnnnnnnnnnnnnnnnnnnnnnnnnnnnnnnnnnnnnnnnnnnnnnnnnnnnnnnnnnnnnnnnnnnnnnnnnnnnnnnnnnnnnnnnnnnnnnnnnnnnnnnnnnnnnnnnnnnnnnnnnnnnnnnnnnnnnnnnnnnnnnnnnnnnnnnnnnnnnnnnnnnnnnnnnnnnnnnnnnnnnnnnnnnnnnnnnnnnnnnnnnnnnnnnnnnnnnnnnnnnnnnnnnnnnnnnnnnnnnnnnnnnnnnnnnnnnnnnnnnnnnnnnnnnnnnnnnnnnnnnnnnnnnnnnnnnnnnnnnnnnnnnnnnnnnnnnnnnnnnnnnnnnnnnnnnnnnnnnnnnnnnnnnnnnnnnnnnnnnnnnnnnnnnnnnnnnnnnnnnnnnnnnnnnnnnnnnnnnnnnnnnnnnnnnnnnnnnnnnnnnnnnnnnnnnnnnnnnnnnnnnnnnnnnnnnnnnnnnnnnnnnnnnnnnnnnnnnnnnnnnnnnnnnnnnnnnnnnnnnnnnnnnnnnnnnnnnnnnnnnnnnnnnnnnnnnnnnnnnnnnnnnnnnnnnnnnnnnnnnnnnnnnnnnnnnnnnnnnnnnnnnnnnnnnnnnnnnnnnnnnnnnnnnnnnnnnnnnnnnnnnnnnnnnnnnnnnnnnnnnnnnnnnnnnnnnnnnnnnnnnnnnnnnnnnnnnnnnnnnnnnnnnnnnnnnnnnnnnnnnnnnnnnnnnnnnnnnnnnnnnnnnnnnnnnnnnnnnnnnnnnnnnnnnnnnnnnnnnnnnnnnnnnnnnnnnnnnnnnnnnnnnnnnnnnnnnnnnnnnnnnnnnnnnnnnnnnnnnnnnnnnnnnnnnnnnnnnnnnnnnnnnnnnnnnnnnnnnnnnnnnnnnnnnnnnnnnnnnnnnnnnnnnnnnnnnnnnnnnnnnnnnnnnnnnnnnnnnnnnnnnnnnnnnnnnnnnnnnnnnnnnnnnnnnnnnnnnnnnnnnnnnnnnnnnnnnnnnnnnnnnnnnnnnnnnnnnnnnnnnnnnnnnnnnnnnnnnnnnnnnnnnnnnnnnnnnnnnnnnnnnnnnnnnnnnnnnnnnnnnnnnnnnnnnnnnnnnnnnnnnnnnnnnnnnnnnnnnnnnnnnnnnnnnnnnnnnnnnnnnnnnnnnnnnnnnnnnnnnnnnnnnnnnnnnnnnnnnnnnnnnnnnnnnnnnnnnnnnnnnnnnnnnnnnnnnnnnnnnnnnnnnnnnnnnnnnnnnnnnnnnnnnnnnnnnnnnnnnnnnnnnnnnnnnnnnnnnnnnnnnnnnnnnnnnnnnnnnnnnnnnnnnnnnnnnnnnnnnnnnnnnnnnnnnnnnnnnnnnnnnnnnnnnnnnnnnnnnnnnnnnnnnnnnnnnnnnnnnnnnnnnnnnnnnnnnnnnnnnnnnnnnnnnnnnnnnnnnnnnnnnnnnnnnnnnnnnnnnnnnnnnnnnnnnnnnnnnnnnnnnnnnnnnnnnnnnnnnnnnnnnnnnnnnnnnnnnnnnnnnnnnnnnnnnnnnnnnnnnnnnnnnnnnnnnnnnnnnnnnnnnnnnnnnnnnnnnnnnnnnnnnnnnnnnnnnnnnnnnnnnnnnnnnnnnnnnnnnnnnnnnnnnnnnnnnnnnnnnnnnnnnnnnnnnnnnnnnnnnnnnnnnnnnnnnnnnnnnnnnnnnnnnnnnnnnnnnnnnnnnnnnnnnnnnnnnnnnnnnnnnnnnnnnnnnnnnnnnnnnnnnnnnnnnnnnnnnnnnnnnnnnnnnnnnnnnnnnnnnnnnnnnnnnnnnnnnnnnnnnnnnnnnnnnnnnnnnnnnnnnnnnnnnnnnnnnnnnnnnnnnnnnnnnnnnnnnnnnnnnnnnnnnnnnnnnnnnnnnnnnnnnnnnnnnnnnnnnnnnnnnnnnnnnnnnnnnnnnnnnnnnnnnnnnnnnnnnnnnnnnnnnnnnnnnnnnnnnnnnnnnnnnnnnnnnnnnnnnnnnnnnnnnnnnnnnnnnnnnnnnnnnnnnnnnnnnnnnnnnnnnnnnnnnnnnnnnnnnnnnnnnnnnnnnnnnnnnnnnnnnnnnnnnnnnnnnnnnnnnnnnnnnnnnnnnnnnnnnnnnnnnnnnnnnnnnnnnnnnnnnnnnnnnnnnnnnnnnnnnnnnnnnnnnnnnnnnnnnnnnnnnnnnnnnnnnnnnnnnnnnnnnnnnnnnnnnnnnnnnnnnnnnnnnnnnnnnnnnnnnnnnnnnnnnnnnnnnnnnnnnnnnnnnnnnnnnnnnnnnnnnnnnnnnnnnnnnnnnnnnnnnnnnnnnnnnnnnnnnnnnnnnnnnnnnnnnnnnnnnnnnnnnnnnnnnnnnnnnnnnnnnnnnnnnnnnnnnnnnnnnnnnnnnnnnnnnnnnnnnnnnnnnnnnnnnnnnnnnnnnnnnnnnnnnnnnnnnnnnnnnnnnnnnnnnnnnnnnnnnnnnnnnnnnnnnnnnnnnnnnnnnnnnnnnnnnnnnnnnnnnnnnnnnnnnnnnnnnnnnnnnnnnnnnnnnnnnnnnnnnnnnnnnnnnnnnnnnnnnnnnnnnnnnnnnnnnnnnnnnnnnnnnnnnnnnnnnnnnnnnnnnnnnnnnnnnnnnnnnnnnnnnnnnnnnnnnnnnnnnnnnnnnnnnnnnnnnnnnnnnnnnnnnnnnnnnnnnnnnnnnnnnnnnnnnnnnnnnnnnnnnnnnnnnnnnnnnnnnnnnnnnnnnnnnnnnnnnnnnnnnnnnnnnnnnnnnnnnnnnnnnnnnnnnnnnnnnnnnnnnnnnnnnnnnnnnnnnnnnnnnnnnnnnnnnnnnnnnnnnnnnnnnnnnnnnnnnnnnnnnnnnnnnnnnnnnnnnnnnnnnnnnnnnnnnnnnnnnnnnnnnnnnnnnnnnnnnnnnnnnnnnnnnnnnnnnnnnnnnnnnnnnnnnnnnnnnnnnnnnnnnnnnnnnnnnnnnnnnnnnnnnnnnnnnnnnnnnnnnnnnnnnnnnnnnnnnnnnnnnnnnnnnnnnnnnnnnnnnnnnnnnnnnnnnnnnnnnnnnnnnnnnnnnnnnnnnnnnnnnnnnnnnnnnnnnnnnnnnnnnnnnnnnnnnnnnnnnnnnnnnnnnnnnnnnnnnnnnnnnnnnnnnnnnnnnnnnnnnnnnnnnnnnnnnnnnnnnnnnnnnnnnnnnnnnnnnnnnnnnnnnnnnnnnnnnnnnnnnnnnnnnnnnnnnnnnnnnnnnnnnnnnnnnnnnnnnnnnnnnnnnnnnnnnnnnnnnnnnnnnnnnnnnnnnnnnnnnnnnnnnnnnnnnnnnnnnnnnnnnnnnnnnnnnnnnnnnnnnnnnnnnnnnnnnnnnnnnnnnnnnnnnnnnnnnnnnnnnnnnnnnnnnnnnnnnnnnnnnnnnnnnnnnnnnnnnnnnnnnnnnnnnnnnnnnnnnnnnnnnnnnnnnnnnnnnnnnnnnnnnnnnnnnnnnnnnnnnnnnnnnnnnnnnnnnnnnnnnnnnnnnnnnnnnnnnnnnnnnnnnnnnnnnnnnnnnnnnnnnnnnnnnnnnnnnnnnnnnnnnnnnnnnnnnnnnnnnnnnnnnnnnnnnnnnnnnnnnnnnnnnnnnnnnnnnnnnnnnnnnnnnnnnnnnnnnnnnnnnnnnnnnnnnnnnnnnnnnnnnnnnnnnnnnnnnnnnnnnnnnnnnnnnnnnnnnnnnnnnnnnnnnnnnnnnnnnnnnnnnnnnnnnnnnnnnnnnnnnnnnnnnnnnnnnnnnnnnnnnnnnnnnnnnnnnnnnnnnnnnnnnnnnnnnnnnnnnnnnnnnnnnnnnnnnnnnnnnnnnnnnnnnnnnnnnnnnnnnnnnnnnnnnnnnnnnnnnnnnnnnnnnnnnnnnnnnnnnnnnnnnnnnnnnnnnnnnnnnnnnnnnnnnnnnnnnnnnnnnnnnnnnnnnnnnnnnnnnnnnnnnnnnnnnnnnnnnnnnnnnnnnnnnnnnnnnnnnnnnnnnnnnnnnnnnnnnnnnnnnnnnnnnnnnnnnnnnnnnnnnnnnnnnnnnnnnnnnnnnnnnnnnnnnnnnnnnnnnnnnnnnnnnnnnnnnnnnnnnnnnnnnnnnnnnnnnnnnnnnnnnnnnnnnnnnnnnnnnnnnnnnnnnnnnnnnnnnnnnnnnnnnnnnnnnnnnnnnnnnnnnnnnnnnnnnnnnnnnnnnnnnnnnnnnnnnnnnnnnnnnnnnnnnnnnnnnnnnnnnnnnnnnnnnnnnnnnnnnnnnnnnnnnnnnnnnnnnnnnnnnnnnnnnnnnnnnnnnnnnnnnnnnnnnnnnnnnnnnnnnnnnnnnnnnnnnnnnnnnnnnnnnnnnnnnnnnnnnnnnnnnnnnnnnnnnnnnnnnnnnnnnnnnnnnnnnnnnnnnnnnnnnnnnnnnnnnnnnnnnnnnnnnnnnnnnnnnnnnnnnnnnnnnnnnnnnnnnnnnnnnnnnnnnnnnnnnnnnnnnnnnnnnnnnnnnnnnnnnnnnnnnnnnnnnnnnnnnnnnnnnnnnnnnnnnnnnnnnnnnnnnnnnnnnnnnnnnnnnnnnnnnnnnnnnnnnnnnnnnnnnnnnnnnnnnnnnnnnnnnnnnnnnnnnnnnnnnnnnnnnnnnnnnnnnnnnnnnnnnnnnnnnnnnnnnnnnnnnnnnnnnnnnnnnnnnnnnnnnnnnnnnnnnnnnnnnnnnnnnnnnnnnnnnnnnnnnnnnnnnnnnnnnnnnnnnnnnnnnnnnnnnnnnnnnnnnnnnnnnnnnnnnnnnnnnnnnnnnnnnnnnnnnnnnnnnnnnnnnnnnnnnnnnnnnnnnnnnnnnnnnnnnnnnnnnnnnnnnnnnnnnnnnnnnnnnnnnnnnnnnnnnnnnnnnnnnnnnnnnnnnnnnnnnnnnnnnnnnnnnnnnnnnnnnnnnnnnnnnnnnnnnnnnnnnnnnnnnnnnnnnnnnnnnnnnnnnnnnnnnnnnnnnnnnnnnnnnnnnnnnnnnnnnnnnnnnnnnnnnnnnnnnnnnnnnnnnnnnnnnnnnnnnnnnnnnnnnnnnnnnnnnnnnnnnnnnnnnnnnnnnnnnnnnnnnnnnnnnnnnnnnnnnnnnnnnnnnnnnnnnnnnnnnnnnnnnnnnnnnnnnnnnnnnnnnnnnnnnnnnnnnnnnnnnnnnnnnnnnnnnnnnnnnnnnnnnnnnnnnnnnnnnnnnnnnnnnnnnnnnnnnnnnnnnnnnnnnnnnnnnnnnnnnnnnnnnnnnnnnnnnnnnnnnnnnnnnnnnnnnnnnnnnnnnnnnnnnnnnnnnnnnnnnnnnnnnnnnnnnnnnnnnnnnnnnnnnnnnnnnnnnnnnnnnnnnnnnnnnnnnnnnnnnnnnnnnnnnnnnnnnnnnnnnnnnnnnnnnnnnnnnnnnnnnnnnnnnnnnnnnnnnnnnnnnnnnnnnnnnnnnnnnnnnnnnnnnnnnnnnnnnnnnnnnnnnnnnnnnnnnnnnnnnnnnnnnnnnnnnnnnnnnnnnnnnnnnnnnnnnnnnnnnnnnnnnnnnnnnnnnnnnnnnnnnnnnnnnnnnnnnnnnnnnnnnnnnnnnnnnnnnnnnnnnnnnnnnnnnnnnnnnnnnnnnnnnnnnnnnnnnnnnnnnnnnnnnnnnnnnnnnnnnnnnnnnnnnnnnnnnnnnnnnnnnnnnnnnnnnnnnnnnnnnnnnnnnnnnnnnnnnnnnnnnnnnnnnnnnnnnnnnnnnnnnnnnnnnnnnnnnnnnnnnnnnnnnnnnnnnnnnnnnnnnnnnnnnnnnnnnnnnnnnnnnnnnnnnnnnnnnnnnnnnnnnnnnnnnnnnnnnnnnnnnnnnnnnnnnnnnnnnnnnnnnnnnnnnnnnnnnnnnnnnnnnnnnnnnnnnnnnnnnnnnnnnnnnnnnnnnnnnnnnnnnnnnnnnnnnnnnnnnnnnnnnnnnnnnnnnnnnnnnnnnnnnnnnnnnnnnnnnnnnnnnnnnnnnnnnnnnnnnnnnnnnnnnnnnnnnnnnnnnnnnnnnnnnnnnnnnnnnnnnnnnnnnnnnnnnnnnnnnnnnnnnnnnnnnnnnnnnnnnnnnnnnnnnnnnnnnnnnnnnnnnnnnnnnnnnnnnnnnnnnnnnnnnnnnnnnnnnnnnnnnnnnnnnnnnnnnnnnnnnnnnnnnnnnnnnnnnnnnnnnnnnnnnnnnnnnnnnnnnnnnnnnnnnnnnnnnnnnnnnnnnnnnnnnnnnnnnnnnnnnnnnnnnnnnnnnnnnnnnnnnnnnnnnnnnnnnnnnnnnnnnnnnnnnnnnnnnnnnnnnnnnnnnnnnnnnnnnnnnnnnnnnnnnnnnnnnnnnnnnnnnnnnnnnnnnnnnnnnnnnnnnnnnnnnnnnnnnnnnnnnnnnnnnnnnnnnnnnnnnnnnnnnnnnnnnnnnnnnnnnnnnnnnnnnnnnnnnnnnnnnnnnnnnnnnnnnnnnnnnnnnnnnnnnnnnnnnnnnnnnnnnnnnnnnnnnnnnnnnnnnnnnnnnnnnnnnnnnnnnnnnnnnnnnnnnnnnnnnnnnnnnnnnnnnnnnnnnnnnnnnnnnnnnnnnnnnnnnnnnnnnnnnnnnnnnnnnnnnnnnnnnnnnnnnnnnnnnnnnnnnnnnnnnnnnnnnnnnnnnnnnnnnnnnnnnnnnnnnnnnnnnnnnnnnnnnnnnnnnnnnnnnnnnnnnnnnnnnnnnnnnnnnnnnnnnnnnnnnnnnnnnnnnnnnnnnnnnnnnnnnnnnnnnnnnnnnnnnnnnnnnnnnnnnnnnnnnnnnnnnnnnnnnnnnnnnnnnnnnnnnnnnnnnnnnnnnnnnnnnnnnnnnnnnnnnnnnnnnnnnnnnnnnnnnnnnnnnnnnnnnnnnnnnnnnnnnnnnnnnnnnnnnnnnnnnnnnnnnnnnnnnnnnnnnnnnnnnnnnnnnnnnnnnnnnnnnnnnnnnnnnnnnnnnnnnnnnnnnnnnnnnnnnnnnnnnnnnnnnnnnnnnnnnnnnnnnnnnnnnnnnnnnnnnnnnnnnnnnnnnnnnnnnnnnnnnnnnnnnnnnnnnnnnnnnnnnnnnnnnnnnnnnnnnnnnnnnnnnnnnnnnnnnnnnnnnnnnnnnnnnnnnnnnnnnnnnnnnnnnnnnnnnnnnnnnnnnnnnnnnnnnnnnnnnnnnnnnnnnnnnnnnnnnnnnnnnnnnnnnnnnnnnnnnnnnnnnnnnnnnnnnnnnnnnnnnnnnnnnnnnnnnnnnnnnnnnnnnnnnnnnnnnnnnnnnnnnnnnnnnnnnnnnnnnnnnnnnnnnnnnnnnnnnnnnnnnnnnnnnnnnnnnnnnnnnnnnnnnnnnnnnnnnnnnnnnnnnnnnnnnnnnnnnnnnnnnnnnnnnnnnnnnnnnnnnnnnnnnnnnnnnnnnnnnnnnnnnnnnnnnnnnnnnnnnnnnnnnnnnnnnnnnnnnnnnnnnnnnnnnnnnnnnnnnnnnnnnnnnnnnnnnnnnnnnnnnnnnnnnnnnnnnnnnnnnnnnnnnnnnnnnnnnnnnnnnnnnnnnnnnnnnnnnnnnnnnnnnnnnnnnnnnnnnnnnnnnnnnnnnnnnnnnnnnnnnnnnnnnnnnnnnnnnnnnnnnnnnnnnnnnnnnnnnnnnnnnnnnnnnnnnnnnnnnnnnnnnnnnnnnnnnnnnnnnnnnnnnnnnnnnnnnnnnnnnnnnnnnnnnnnnnnnnnnnnnnnnnnnnnnnnnnnnnnnnnnnnnnnnnnnnnnnnnnnnnnnnnnnnnnnnnnnnnnnnnnnnnnnnnnnnnnnnnnnnnnnnnnnnnnnnnnnnnnnnnnnnnnnnnnnnnnnnnnnnnnnnnnnnnnnnnnnnnnnnnnnnnnnnnnnnnnnnnnnnnnnnnnnnnnnnnnnnnnnnnnnnnnnnnnnnnnnnnnnnnnnnnnnnnnnnnnnnnnnnnnnnnnnnnnnnnnnnnnnnnnnnnnnnnnnnnnnnnnnnnnnnnnnnnnnnnnnnnnnnnnnnnnnnnnnnnnnnnnnnnnnnnnnnnnnnnnnnnnnnnnnnnnnnnnnnnnnnnnnnnnnnnnnnnnnnnnnnnnnnnnnnnnnnnnnnnnnnnnnnnnnnnnnnnnnnnnnnnnnnnnnnnnnnnnnnnnnnnnnnnnnnnnnnnnnnnnnnnnnnnnnnnnnnnnnnnnnnnnnnnnnnnnnnnnnnnnnnnnnnnnnnnnnnnnnnnnnnnnnnnnnnnnnnnnnnnnnnnnnnnnnnnnnnnnnnnnnnnnnnnnnnnnnnnnnnnnnnnnnnnnnnnnnnnnnnnnnnnnnnnnnnnnnnnnnnnnnnnnnnnnnnnnnnnnnnnnnnnnnnnnnnnnnnnnnnnnnnnnnnnnnnnnnnnnnnnnnnnnnnnnnnnnnnnnnnnnnnnnnnnnnnnnnnnnnnnnnnnnnnnnnnnnnnnnnnnnnnnnnnnnnnnnnnnnnnnnnnnnnnnnnnnnnnnnnnnnnnnnnnnnnnnnnnnnnnnnnnnnnnnnnnnnnnnnnnnnnnnnnnnnnnnnnnnnnnnnnnnnnnnnnnnnnnnnnnnnnnnnnnnnnnnnnnnnnnnnnnnnnnnnnnnnnnnnnnnnnnnnnnnnnnnnnnnnnnnnnnnnnnnnnnnnnnnnnnnnnnnnnnnnnnnnnnnnnnnnnnnnnnnnnnnnnnnnnnnnnnnnnnnnnnnnnnnnnnnnnnnnnnnnnnnnnnnnnnnnnnnnnnnnnnnnnnnnnnnnnnnnnnnnnnnnnnnnnnnnnnnnnnnnnnnnnnnnnnnnnnnnnnnnnnnnnnnnnnnnnnnnnnnnnnnnnnnnnnnnnnnnnnnnnnnnnnnnnnnnnnnnnnnnnnnnnnnnnnnnnnnnnnnnnnnnnnnnnnnnnnnnnnnnnnnnnnnnnnnnnnnnnnnnnnnnnnnnnnnnnnnnnnnnnnnnnnnnnnnnnnnnnnnnnnnnnnnnnnnnnnnnnnnnnnnnnnnnnnnnnnnnnnnnnnnnnnnnnnnnnnnnnnnnnnnnnnnnnnnnnnnnnnnnnnnnnnnnnnnnnnnnnnnnnnnnnnnnnnnnnnnnnnnnnnnnnnnnnnnnnnnnnnnnnnnnnnnnnnnnnnnnnnnnnnnnnnnnnnnnnnnnnnnnnnnnnnnnnnnnnnnnnnnnnnnnnnnnnnnnnnnnnnnnnnnnnnnnnnnnnnnnnnnnnnnnnnnnnnnnnnnnnnnnnnnnnnnnnnnnnnnnnnnnnnnnnnnnnnnnnnnnnnnnnnnnnnnnnnnnnnnnnnnnnnnnnnnnnnnnnnnnnnnnnnnnnnnnnnnnnnnnnnnnnnnnnnnnnnnnnnnnnnnnnnnnnnnnnnnnnnnnnnnnnnnnnnnnnnnnnnnnnnnnnnnnnnnnnnnnnnnnnnnnnnnnnnnnnnnnnnnnnnnnnnnnnnnnnnnnnnnnnnnnnnnnnnnnnnnnnnnnnnnnnnnnnnnnnnnnnnnnnnnnnnnnnnnnnnnnnnnnnnnnnnnnnnnnnnnnnnnnnnnnnnnnnnnnnnnnnnnnnnnnnnnnnnnnnnnnnnnnnnnnnnnnnnnnnnnnnnnnnnnnnnnnnnnnnnnnnnnnnnnnnnnnnnnnnnnnnnnnnnnnnnnnnnnnnnnnnnnnnnnnnnnnnnnnnnnnnnnnnnnnnnnnnnnnnnnnnnnnnnnnnnnnnnnnnnnnnnnnnnnnnnnnnnnnnnnnnnnnnnnnnnnnnnnnnnnnnnnnnnnnnnnnnnnnnnnnnnnnnnnnnnnnnnnnnnnnnnnnnnnnnnnnnnnnnnnnnnnnnnnnnnnnnnnnnnnnnnnnnnnnnnnnnnnnnnnnnnnnnnnnnnnnnnnnnnnnnnnnnnnnnnnnnnnnnnnnnnnnnnnnnnnnnnnnnnnnnnnnnnnnnnnnnnnnnnnnnnnnnnnnnnnnnnnnnnnnnnnnnnnnnnnnnnnnnnnnnnnnnnnnnnnnnnnnnnnnnnnnnnnnnnnnnnnnnnnnnnnnnnnnnnnnnnnnnnnnnnnnnnnnnnnnnnnnnnnnnnnnnnnnnnnnnnnnnnnnnnnnnnnnnnnnnnnnnnnnnnnnnnnnnnnnnnnnnnnnnnnnnnnnnnnnnnnnnnnnnnnnnnnnnnnnnnnnnnnnnnnnnnnnnnnnnnnnnnnnnnnnnnnnnnnnnnnnnnnnnnnnnnnnnnnnnnnnnnnnnnnnnnnnnnnnnnnnnnnnnnnnnnnnnnnnnnnnnnnnnnnnnnnnnnnnnnnnnnnnnnnnnnnnnnnnnnnnnnnnnnnnnnnnnnnnnnnnnnnnnnnnnnnnnnnnnnnnnnnnnnnnnnnnnnnnnnnnnnnnnnnnnnnnnnnnnnnnnnnnnnnnnnnnnnnnnnnnnnnnnnnnnnnnnnnnnnnnnnnnnnnnnnnnnnnnnnnnnnnnnnnnnnnnnnnnnnnnnnnnnnnnnnnnnnnnnnnnnnnnnnnnnnnnnnnnnnnnnnnnnnnnnnnnnnnnnnnnnnnnnnnnnnnnnnnnnnnnnnnnnnnnnnnnnnnnnnnnnnnnnnnnnnnnnnnnnnnnnnnnnnnnnnnnnnnnnnnnnnnnnnnnnnnnnnnnnnnnnnnnnnnnnnnnnnnnnnnnnnnnnnnnnnnnnnnnnnnnnnnnnnnnnnnnnnnnnnnnnnnnnnnnnnnnnnnnnnnnnnnnnnnnnnnnnnnnnnnnnnnnnnnnnnnnnnnnnnnnnnnnnnnnnnnnnnnnnnnnnnnnnnnnnnnnnnnnnnnnnnnnnnnnnnnnnnnnnnnnnnnnnnnnnnnnnnnnnnnnnnnnnnnnnnnnnnnnnnnnnnnnnnnnnnnnnnnnnnnnnnnnnnnnnnnnnnnnnnnnnnnnnnnnnnnnnnnnnnnnnnnnnnnnnnnnnnnnnnnnnnnnnnnnnnnnnnnnnnnnnnnnnnnnnnnnnnnnnnnnnnnnnnnnnnnnnnnnnnnnnnnnnnnnnnnnnnnnnnnnnnnnnnnnnnnnnnnnnnnnnnnnnnnnnnnnnnnnnnnnnnnnnnnnnnnnnnnnnnnnnnnnnnnnnnnnnnnnnnnnnnnnnnnnnnnnnnnnnnnnnnnnnnnnnnnnnnnnnnnnnnnnnnnnnnnnnnnnnnnnnnnnnnnnnnnnnnnnnnnnnnnnnnnnnnnnnnnnnnnnnnnnnnnnnnnnnnnnnnnnnnnnnnnnnnnnnnnnnnnnnnnnnnnnnnnnnnnnnnnnnnnnnnnnnnnnnnnnnnnnnnnnnnnnnnnnnnnnnnnnnnnnnnnnnnnnnnnnnnnnnnnnnnnnnnnnnnnnnnnnnnnnnnnnnnnnnnnnnnnnnnnnnnnnnnnnnnnnnnnnnnnnnnnnnnnnnnnnnnnnnnnnnnnnnnnnnnnnnnnnnnnnnnnnnnnnnnnnnnnnnnnnnnnnnnnnnnnnnnnnnnnnnnnnnnnnnnnnnnnnnnnnnnnnnnnnnnnnnnnnnnnnnnnnnnnnnnnnnnnnnnnnnnnnnnnnnnnnnnnnnnnnnnnnnnnnnnnnnnnnnnnnnnnnnnnnnnnnnnnnnnnnnnnnnnnnnnnnnnnnnnnnnnnnnnnnnnnnnnnnnnnnnnnnnnnnnnnnnnnnnnnnnnnnnnnnnnnnnnnnnnnnnnnnnnnnnnnnnnnnnnnnnnnnnnnnnnnnnnnnnnnnnnnnnnnnnnnnnnnnnnnnnnnnnnnnnnnnnnnnnnnnnnnnnnnnnnnnnnnnnnnnnnnnnnnnnnnnnnnnnnnnnnnnnnnnnnnnnnnnnnnnnnnnnnnnnnnnnnnnnnnnnnnnnnnnnnnnnnnnnnnnnnnnnnnnnnnnnnnnnnnnnnnnnnnnnnnnnnnnnnnnnnnnnnnnnnnnnnnnnnnnnnnnnnnnnnnnnnnnnnnnnnnnnnnnnnnnnnnnnnnnnnnnnnnnnnnnnnnnnnnnnnnnnnnnnnnnnnnnnnnnnnnnnnnnnnnnnnnnnnnnnnnnnnnnnnnnnnnnnnnnnnnnnnnnnnnnnnnnnnnnnnnnnnnnnnnnnnnnnnnnnnnnnnnnnnnnnnnnnnnnnnnnnnnnnnnnnnnnnnnnnnnnnnnnnnnnnnnnnnnnnnnnnnnnnnnnnnnnnnnnnnnnnnnnnnnnnnnnnnnnnnnnnnnnnnnnnnnnnnnnnnnnnnnnnnnnnnnnnnnnnnnnnnnnnnnnnnnnnnnnnnnnnnnnnnnnnnnnnnnnnnnnnnnnnnnnnnnnnnnnnnnnnnnnnnnnnnnnnnnnnnnnnnnnnnnnnnnnnnnnnnnnnnnnnnnnnnnnnnnnnnnnnnnnnnnnnnnnnnnnnnnnnnnnnnnnnnnnnnnnnnnnnnnnnnnnnnnnnnnnnnnnnnnnnnnnnnnnnnnnnnnnnnnnnnnnnnnnnnnnnnnnnnnnnnnnnnnnnnnnnnnnnnnnnnnnnnnnnnnnnnnnnnnnnnnnnnnnnnnnnnnnnnnnnnnnnnnnnnnnnnnnnnnnnnnnnnnnnnnnnnnnnnnnnnnnnnnnnnnnnnnnnnnnnnnnnnnnnnnnnnnnnnnnnnnnnnnnnnnnnnnnnnnnnnnnnnnnnnnnnnnnnnnnnnnnnnnnnnnnnnnnnnnnnnnnnnnnnnnnnnnnnnnnnnnnnnnnnnnnnnnnnnnnnnnnnnnnnnnnnnnnnnnnnnnnnnnnnnnnnnnnnnnnnnnnnnnnnnnnnnnnnnnnnnnnnnnnnnnnnnnnnnnnnnnnnnnnnnnnnnnnnnnnnnnnnnnnnnnnnnnnnnnnnnnnnnnnnnnnnnnnnnnnnnnnnnnnnnnnnnnnnnnnnnnnnnnnnnnnnnnnnnnnnnnnnnnnnnnnnnnnnnnnnnnnnnnnnnnnnnnnnnnnnnnnnnnnnnnnnnnnnnnnnnnnnnnnnnnnnnnnnnnnnnnnnnnnnnnnnnnnnnnnnnnnnnnnnnnnnnnnnnnnnnnnnnnnnnnnnnnnnnnnnnnnnnnnnnnnnnnnnnnnnnnnnnnnnnnnnnnnnnnnnnnnnnnnnnnnnnnnnnnnnnnnnnnnnnnnnnnnnnnnnnnnnnnnnnnnnnnnnnnnnnnnnnnnnnnnnnnnnnnnnnnnnnnnnnnnnnnnnnnnnnnnnnnnnnnnnnnnnnnnnnnnnnnnnnnnnnnnnnnnnnnnnnnnnnnnnnnnnnnnnnnnnnnnnnnnnnnnnnnnnnnnnnnnnnnnnnnnnnnnnnnnnnnnnnnnnnnnnnnnnnnnnnnnnnnnnnnnnnnnnnnnnnnnnnnnnnnnnnnnnnnnnnnnnnnnnnnnnnnnnnnnnnnnnnnnnnnnnnnnnnnnnnnnnnnnnnnnnnnnnnnnnnnnnnnnnnnnnnnnnnnnnnnnnnnnnnnnnnnnnnnnnnnnnnnnnnnnnnnnnnnnnnnnnnnnnnnnnnnnnnnnnnnnnnnnnnnnnnnnnnnnnnnnnnnnnnnnnnnnnnnnnnnnnnnnnnnnnnnnnnnnnnnnnnnnnnnnnnnnnnnnnnnnnnngatcccgcggccgtgttttcctggtggcccggccgtgcctgaggtttctccccgagccgccgcctctgcgggctcccgggtgcccttgccctcacggtccccggccctcgcccgtctgtgccctcttccccgcccgccgcccgccgatcctcttcttccccccgagcggctcaccggcttcacgtccgttggtggccccgcctgggaccgaacccggcaccgcctcgtggggcgccgccgccggccactgatcggcccggcgtccgcgtcccccggcgcgcgccttggggaccgggttggtggcgccccgcgtggggcccggtgggcttcccggagggttccgggggtcggcctgcggcgcgtgcgggggaggagacggttccgggggaccggccgcgactgcggcggcggtggtggggggagccgcggggatcgccgagggccggtcggccgccccgggtgccgcgcggtgccgccggcggcggtgaggccccgcgcgtgtgtcccggctgcggtcggccgcgctcgaggggtccccgtggcgtccccttccccgccggccgcctttctcgcgccttccccgtcgccccggcctcgcccgtggtctctcgtcttctcccggcccgctcttccgaaccgggtcggcgcgtcccccgggtgcgcctcgcttcccgggcctgccgcggcccttccccgaggcgtccgtcccgggcgtcggcgtcggggagagcccgtcctccccgcgtggcgtcgccccgttcggcgcgcgcgtgcgcccgagcgcggcccggtggtccctcccggacaggcgttcgtgcgacgtgtggcgtgggtcgacctccgccttgccggtcgctcgccctttccccgggtcggggggtggggcccgggccggggcctcggccccggtcgcggtcccccgtcccgggcgggggcgggcgcgccggccggcctcggtcggccctcccttggccgtcgtgtggcgtgtgccacccctgcgcccgcgcccgccggcggggctcggagccgggcttcggccgggccccgggccctcgaccgggaccggtgcgcgggcgctgcggccgcacggcgcgactgtccccgggccgggcaccgcggtccgcctctcgctcgccgcccggacgtcggggccgccccgcggggcgggcggagcgccgtccccgcctcgccgccgcccgcgggcgccggccgcgcgcgcgcgcgcgtggccgccggtccctcccggccgccgggcgcgggtcgggccgtccgcctcctcgcgggcgggcgcgacgaagaagcgtcgcgggtctgtggcgcggggccccggtggtcgtgtcgcgtggggggcgggtggttggggcgtccggttcgccgcgccccgccccggccccaccggtcccggccgccgcccccgcgcccgctcgctccctcccgtccgcccgtccgcggcccgtccgtccgtccgtccgtcgtcctcctcgcttgcggggcgccgggcccgtcctcgcgaggccccccggccggccgtccggccgcgtcggggcctcgccgcgctctacctacctacctggttgatcctgccagtagcatatgcttgtctcaaagattaagccatgcatgtctaagtacgcacggccggtacagtgaaactgcgaatggctcattaaatcagttatggttcctttggtcgctcgctcctctcctacttggataactgtggtaattctagagctaatacatgccgacgggcgctgacccccttcgcgggggggatgcgtgcatttatcagatcaaaaccaacccggtcagcccctctccggccccggccggggggcgggcgccggcggctttggtgactctagataacctcgggctgatcgcacgccccccgtggcggcgacgacccattcgaacgtctgccctatcaactttcgatggtagtcgccgtgcctaccatggtgaccacgggtgacggggaatcagggttcgattccggagagggagcctgagaaacggctaccacatccaaggaaggcagcaggcgcgcaaattacccactcccgacccggggaggtagtgacgaaaaataacaatacaggactctttcgaggccctgtaattggaatgagtccactttaaatctaatccaggaaaagagtacaaaacgccacattctcacttgtattgggagctgaaaaatgggatcacatggacgcaggaaggggaacaacacacactggggcttttcgggagacagagcgttaagaaaaacagctgttgcatgctgggcttaatacctaggttatgggttgacaggtgcagcaaaccaccatggcactcgtttaccttagtaacaaatatgcacatcctgtccatataccccagaacttagaaacagaacgaaacaaaagaaaaccagaaagcaatagcaaaccgctagcgggaaaacaatttttcaaactcagaaaatgacagaccaatttttccttcaaatcatggttcttaacccaggtgccataaagtcagggtaaagaatttgattacatattgtaaataagacatgcagcaaatgaccagaaaaattattcccaacatatgtgtgtctttgaattcaatggtgacgctatctaccgggacataacattagattccaaagggccgagtcctgcaagactgtcctcccattaataacaatggaaagccctacgttgttttagctgcttttctcagcagctggttataaatcaggtttccaccactccctgttatagttgcatccatttgctggaagagctcacaacacgcagggaggccattacatttaccattttattgttgcagatattgcaaaaaatttagaaaaatttttggtcccgtcttgtttggagtggcactctaccttccagttagtgttatccagaagctctctacagccattccttttggatttttttggagacctcactctagaggcatgatgggttaaactataggctgttggtcatcaactcaacctgaggctctgaaccctccctgggaattggggttgaggctttgtaaaagaatttgcacaaacggaattttaaaacagattagcgtaactggaatcttaattagatgattgaattatctggagtcacaccttgatattgctaaaccgagcaccctcatccaaagaaggttcctcccaattggctcctaagtctctacctggttccagagcaaaagaatgttttatacaaggcatatctccacctcttcaaagtcttttcgcttacacgggttattcttaaaccgccatgcatcatggtcagggggagggcttgttacaacacagatctgtggatctccgtgttttgagggttgaaaggatgctgccgttgtcaaaagcacaatgtgacaacctcagaaccactagttggttttcagtgtttcagtgcatttaattcataatatatttggtcaagaaaacttgtaagttcttaagttgtcccaaaggtggcacatgaaatcaaatcaggagaatagtttcctacgaggtgtttcctggttaagttgtgggtgactcatggaaaggaggagtgaagcgtcgccctttccactgctaggctgcgcgcgatgctatttaaacccaccctgacgggcctgtactcagatcttcacagagccgagcagcggccggagcattttgccagctctgcatggacttgtagctcacagggtcttgcgacttggagtcggattcagaggactggacagaacacttggattaagtgagtctgtctgtctgtctcattggttggtttttccattttcttaaggagcgcatacctcacaccacacacacacacacacagacactctcacactcacacacactccttcattctcagggtttgaaaatttgttggggtccctgggagcttcaggttttgtaatcctgtctgcacctgaaaacagtagggtcttgtctggctcttcttgtgaacagtccctcagcccggattccccaagttcgatgatgctagcctcacccagcttctccctctcccctctcagtaactcagacttaagaggaagctcctcaccagggatccggagctaccattcaccatcccctagggcttctccacactcaactctgtcatccccagaatcccacaagctcccatttccctgtcctcaccgcgatgggcaatcaatgaagccattgggctctcccatgtcatcctctgattattcttcagagtcaccgcgttcatcaattatgtaccacatgttcttactgccatcacccagcaactctcccccagctctgggggagtctcctctgtctcccagctactctccaaacaaccccagatttcagctggagtcagcctcccacatccaggatcacctacaaactcatgagcctcacggtgctcctcccctatgtctttcatctcttcacccccaggcctcagggactctcctgtggctcccagttactctccagccatccccaggttcctgcgggagtcagccccatgcacccaggagtcccacagagacccacagtctcgggagaatatgagcggtccaccagccctgactcctcaagattcatgcctgcctcagccagcttctccctctcccctcccagaaactcatacccaaggggcagctcctcaccagggatgtggaagtactctacatcatctcacagggcttcaccactctcacctccctcatcgacagaatttcacaactttacttttccctttcataaccaatcactacaatcactcatgtcattgtgttctcccgtgtcctcctctggagattcttcacagtcacctcgttcatcaattatataccatatgttcttactgccatcatccagcagctcacccccacccatcaacgactctcctttctgtcccagctactgtccaactatgtccagttttcagtggttttatgtctcccacaccccagaaacacctagaaagtcagagacctcagtgagatcctcgccagtctctctcacgtcttcaccaccagcccttacgaaccctcctgtctgtcccagctactctccaaccacgcccacatttcagccccagtcatttccaggatcccagggatcaccaccaagctccccactttcactgtgttactccccagtccctaccacgtgtttatctccaaacctcaggaaatctcctgtctgtcccagctactttccaacttcgcctacatttcagcaggagttcattgcaggcaccgagaaatcaccaccaaactcaccaatttcactgcgttactccccagtttctctcatgtcttcaccatccctcagggactgtcccttctgtcccagctactctccacccacgcccagatttcagctggagtcagttccaggcaccccaaaatcaccaccaaactcacctatttcattcaatttcttcccagtctctctcatgtctttacccccagccccctgggactctcctgtctgtcccagctactctaccagcaagcccagatttcagcgggactcagcctcctacactctggaatcacctacagactcacaaacctcactggggtcctcccttgtctccctcaggtctttgccctcagcccacagtatctctttcagctactctgaatacttttctagattccagctggagtcagttccaggcacccacgacacaccaccaatctcacccatatcactgactcatgttttcacccccagccctcaaggactcttctgtctctctcatttactctccaaccatctccagatgtcagctggagtcaacttcccacacccaggagtcacctagaaactcacagaacttactgccaccctcccccatttctttcacctcttcacccccaaacttcaggactctactctgtctcccagcttctctccagccttcccctgatttctgcagcagtcagccccaggcacccaggagaaccctaaaaactcacaggtctcacactactatttccctatgacctgtatctatacagtgatggctcccacatagccctcagtgaccccaaacccatctccacttatactcagacactcccaggcctatcagctactcccattattgtccttcagttcgaagccctggccaatccactagcctccatgaagcagttacatgaccatttctccacttttctgatgagggctccacacgcagctactgaagattccctcctgcattccttcctgacacacaggcctgtccatctacttgctactctcacactcttgccagcagaaggggctcctctaatggcccatatcaccacaaaggctattgtcaccccacagctgtgtagcacgaccttcctgcttgccgacgtggctgccagtgcccatgctgacaggaacctctaccatgtcggcatccctgtgggtgacactactggtgtgacattgctagcatgaccctcctacctggcagtgacactgttgatgtgagcccccattttcaggtctgtgatttgtaaatagggtcattttcccttttctttctttctgccattcatagggcttttcattctctctgtttctgtctccatttcagatatttactcaccccttttctcttttccctatgtctcctgtggtcttaatgagagtgtgccacataagattcccccaataaaagtgatgaattgagtggcttttagtatacttgttgttgtgcacatttaattttaattcacaatccattttagaccattatatcatcccctagcagagaaccctgtaagcattaatcattcctcattctgtctcaaaccctctctccgatgctcagcactaggtaacaactacatagagtgctcaaacctatctccatagatttgcatgttgtggacatttcctataaacagaattatacagtatgtaagcttttatgactgactttacacttatcagaatattttcaaagttcatccacattgtagcgttatccagagtgagaaacaatttttttttttttagtaacaccaggcgttttctcctggcttccttccttcctcctatttctctcttactccttctgccctctgtgttttatattccttaggtgcatcctactttctgtgtttttttgggaaatcctggacagttgcaggaaaattgtgttattgtttttgtttactggtatctctctttcatggttctccatcaattgtaaacatctattggtttctcccaagtcactaagtatgttttaattaggtacacctgtttttctttatacatctctttctggagtatagggttacatactgatgaacccagtgtaactcaagaacgcatctaatatcctaataaacccatcgtaatgttgaaaaatcataaatcaaaccatcataagtcagggtttgtccgtggttatgggtttcatcatttctgttgtaatcattaatgccgtacacgtttaaaaatgacatagtggtagggaagggataatcctagcattttaaaattcagttgttacagggatcccacataatattttgtcatttatatgagggtggatgagggctgaaatttcatcttgggtcttggaacagattcatgggcacacattttaaagcgattggtcctcagttctgcagattaagaaacttcaatttattgattccccagggtaatgagaaaatgcattgagtgatatataacatccaccacattcacaggaaatgctgtcctggatcaaaaactgacctggtcattgaattatgttggagaactcataaaaattccatggagaaagtgatattcaagttgggtcatgaattctgagtaaaagtataaagcaaaggagaggatagccttacagagataacaatagcaacaaagtcacagacttgtggaaatggaagaccggggtagaaattaggacagttcatattcaagcaaacagggttgggtttgtgaacaaataccttgaagctttggatgccttggagcccttgacagtttttgagaatgtatcaaaacaattaaatagtctatttggaagtgagagccctggtacttctaggatgtaacttttgatcaataatgagaatagagtaataaagaaatgtgttatcactctaattgacaactctcgttatggcacagaaaaagatatgtctatcttggcaacagaattgtatcccagaaaatatctaatacataatatatatagtaatgtagtaagtgaacaaaatagtatttcaatctatacagaaagaaaatttttcaggaaatattgttgacaaaactcgacaaacaattggagaatcagaaaataagatcttcctttcataccacacacagggattaaaaacaatagaagcattagaagtgaatatagacatgtgtttattgggaatcagggtaaggaaagtctttatgatcctacaggaaaatacacaatccagaataaaaacacagataaattttgacaaatcaagttgtttttaatttaaacttctttacggtataacatttcaaactggggaataattaatcatttataacagagtcaataccattagtttagacagaatttaaaataaatgaatgaagaaagtgggcaaaggatataaacggaaaattcaccaccattgttatatcaacgtctgttcaacatttccatgatcaacgaaatgcagtcaataataagtcagcatgttcagtctaccaaatagtgataacattaagaaaatgattatttctagtttagctacactgaaattggaagtaaaagtttactggaggacaaggtagtatgggatctaaaaactaaattatcttaggcaaccattacaaatgatttcatgatgtagtgaaaatctgtctacaatatacgatctgtgattaaaaaaaatgcttacaagctattacaggccatttgctagaggggatttaatatatatatatatatatatatatatatatatatatatatatatgctcacgaacatcagaaaataaataagccaagatattaatattgtgttcacgtgtgctaggattacagcagactttaaattcgttagatttttttctttctttatgttgaatatgcacactttttaaaataaacctttaaacgtaatttacatcaaaacaaccagtaatactgcatatgcaatggtgatggatatggatttttttgagaatattgtaatgttttctttaacacgaatgtgtcaggagtgagtaaagacgttctaaaaatagaaaaaattagctgggcgctatggtggggcctgtaatcccagctatttgggaggccaaggcaggagaatcacttgaacccgggaggcagaggttgcagtgagccgagatcatgccactgcactctagcctggtccacagagtgagactgcgtctcaaaaaaaaaaaaaaaaaaaaaaaagaaagagagaaggaaggaaggaaggaaggagtggtggttccgaaacccgaatataggaccacaggacaccatggaggaccacctctgttttctgagtagtggggggaactagagggggcgctcatttatggccctatatggaccctaattcagacttcctggcggagggtcctgggaaatgtccgaccgtctggagtcactcacttccacttccgtcaggaaccacactgagctcatctcagagaatgctgaagcactctgggaaacacttacatttacgagtttattataaaggatattgcaaaaatttcagaaaaaaaaattcatgggacaaggcatgcgaagagatgcactgccttccgggaagttatatccagaagctttctaaacccagtgcttttgaggatttatagataacttgggaattaatactctacaacctgtgatggagcagggagcagggtcagctgtccattagcatctcttgtgaggtctctccattttcataaagaggcttgagaaaatctccagatttgcctgagggtagacacaagggaatgctcagtaatactcaatgttatcagcctactggacttggtataaaagactttttgagcactatattgcctattaaaaaacagtaaagtgtaaaagatagttctttagacaaattgggccacggaaatgccaaatcattagttttggtgtctgtaatgcctcacaaagttataaacttttatgaataatttgctaaggaattagctctaatgacaggtagtttatttatataccttcataacatctacaggtatctatgcacatgacattatagaaatatttgtttgggtttttctcaaccagtcattttctacaccataattccagctcagcccactccacttgcaattgcttgctctcatcttctaactcctgtttattcttctcaatttctgctgtaatggcttcatttaacctgctcctccgtatcttgtatgctttttagttcactgcttatttccttcttcctgctggaaaacttggctaaataacttgtattaatattttagcctcatttagcttcaagattatctcataaggatatctgagcaccaacttcccttactccagctctcagacttctttccattgttatgacaattgaaggcttcttaaattcctgtcctaggagaagttgctcataatttgccatacatctatgatgttttaattaatactgacctctgaatgatctagaaaataatgttaaaccatgtacacatatttgtgtgtgtgcatgtgtgcatgtatccatagcatctgtgtgtgtgtacattttatagatttttgtctttgtatgaagaaatatactgaatatccaaataatcataatttctatacaagtgaggtatgtgggttaaaatctagtgaacaaaatataactatacattcatgatttggaaaccttttaacatgattttgaggaattactcaattgttaattgtttctgccttctctaacaaaatgactaatatttggactgaaaagaaaaaaagaaaacctccgtaagtggaatttctgtaggtggtagctctggaatatcccaccaagagaatgaatccgattaaaataatgactgtagaaatttccttgttagcgaatattcagcctggccttaaggaaaatgtagctctctcttactgctttgtatcttatttcttttactatgtcaattctcaccttagtagaactactactagttctagtaccatggctgtcatagatgcaaccattatattccatttagtttcttcctcaggttccctaacaattgtttgaaactgaatatatatgtttatgtatgtgtgtgtgttcactgtcatgtatatggtgtatatgggatgtgtgcagttttcagttatatatatattcatatatacatatgcatatatatgtataatatacatatatacatgcatacacatatataatatacatatatatacacatatatgcacacatatagtcactgagttccaaagtgagtctttatttggggcaattgtattctctcccctctgtctgctcactggcctttgcaagacatagcaattgcttgattttcctttggataagagtcttatcttcggcactcttgactctagccttaactttagatttctattccagaatacctctcatatctatcttaagacctaagatgggtaaagaggtcataagatttgtagtatgaaagagtttgcttagttaaattatatctcaggaaactcattcatctacaagttaaattgtaaaatgattgtttgttgtatctgaaaaaatgtttagaacaagaaatgtaactgggtagcctgttatatcaaagaaccctcgatttattaagtctcctcatagccatatccttatatagccctctctgacactgacttaatagacacttgataaatgatagtaaatttaggcttggcaaattaaaatggcaccaatgccaagtgagaacctgatctactctaccagagagactaagtggaggagaacccagctgatagcaccagtgaactaccagatatttgagtgatgtcactttggactatgtaggccttgtcagtcatataaggaaacctaggcaagactccaaatattttcctccggagcccaaccaaagttaacaaattgtgagtatgtgttttcagcaactaagtttgatgactgctaattacacagcaatggctaactgaaataacaactaaaaattaaagatgagataatgaactgtgtttaaaaatttagcaagtgagtacttcatgaatatatttaccttgatggcattacaagctaagttttactgagctttattagaacaaattatttgagcattgaagagaaagtgaactttcaaactatcttatttacgtttatgtttcagttatcccacaaaagcaggaaatcactttcaacaatgcacctgagatattttacagtaactctcttgttatttccaggtatcaggtggagaaatacggatcagacacaaagacaataatgttcattgctctctagctgaatactttttctcaaatgggtttattagtaaattgatgacaacttgatttgatgtttactctgattgatgtgtgatgtaaagttcttcctaaagccccctttcttttcctttttaaaattattaatgtagacgaatacagagaatgtgaacatattagatatatagatatcacaacaggagaacagtcaatgttatgttttagactatttcaaccctaaaatgtggacacaggttggaatgaggatccatttcagcataatagcctccaatggagtggggaacatataaaatcctgtgttgctttatgaaatgttgcttatttgcttcatgtttttaaaaagtatcagttttatttaatagtgggatctttatgtcagggattactgatgtttccagcaagctaattcgtaccagggagacaatgtaaacatttagaaaggggattatatttctgttctgtctgcatatgtcagatgacaatgagagtttcaaagtacaatcctaagaagggttgtattgtagatttagcctagaagcccaaagccattaaatttttatcaaaattatacctgaaaattcttcatgttgttcattagcagtcatcatctttacaaagataaaggaaataaagtgatttccatctgttgcaatctcttgccttttacaatagacaaaattgttactttcattaggtttcacaaaaggaatgatatataaattattaaaaggcatgttaagttctttcaccagagaaatttagattattcttgcataaaatcaataaatataatccagcacataaacagatccaaagacaaaaaccacatgattatctcaatagatgcagaaaaggcctttgacaaaattcaacaacacttcatgctaaaaactctcaataaattaggtgtcgatgggacatatctcaaaataataagagctatctatgacaaacccacagccaatatcatactgaatggacaaaaactggaagcattccctttgaaaactggcacaagacagggatgccctctctcaccactcctattcaatatagtgttggaagttctggccagggtaattaggcaggagaaggaaataaagggcattcaattaggaaaagaggaagccaaatcgtccctgtttgcagatgacatgattgtatatctagaaaaacccattgtctcagcctaaagtctccttaaccagataagcaacttcagcaaagtctcaggatacaaaatcaatgtgcaaaaatcacaaccattcttatacaccaataacagacaaacagagagccaaatcatgagtgaactcccattcacaattgcttcaaacagaataaaatacctaggaatccaacttacaagggatgtgaaggacctcttcaaggagaactgtaaaccactgctcaatgaaatagaagaggatacaaacaaatggaataacattccatgctcatgggtaggaagaatcaatatcatgaaaacggccatactacccaaggtaatttatagattcaatgccatccccattaagctaccaatgacattcttcatagaattggaaaaataactactttaaagttcatatggaaacaaaaaagagcccacatttccaagtcaatcctaagcaaaaagaacaaagctggaggcatcacactacctgacttcaaactatactacaaggctacagtaaacaaaacagcatggtactggtaccaaaacagagatatagaccgatggaaataatgccctcagaaataatgccgcatatctacagctatctgatctttgacaaaactgacaaaaagaaaaaatgaggaaaggattccctatttaataaatggtgctgggaaaactggctagccatatgtagaaagctgaaactggatcccttccttacacctcatacaaaaattaattcaaaatagattaaagacttacatgttagacctaaaaccataaaaaccctagaagaaaacctaggcaatagcattcaggacataggcataggcaaggacttcatgtctaaaacaccaaaagcaatgacaacaaaagccaaaattgacaaatgggatctaattaaactaaagagcttctgcacagcaaaagaaactaccatcagagtgaacaggcaacctacaaaatgggagaaaatttttgcaacctactagtctgacaaagggctaatatccagaatctacaatgaactcaaacaaatttacaagaaaaaaacaaacagccccatcaaaaagtgggtgaacgatgtgaacagacacttctcaaaagaagacatttatgcagccaaaaaaacacatgaaaaaatgctcatcatcactggccatcagagaaatgcaaatcaaaaccacaatgagataccatctcacaccagttagaatgatgatcattaaaaagattaaaaagtcaggaaacaacaggtgctggagaggaagtggagaaataggaacacttttacactgttggtgggactgtaaactggttcaaccattgtggaagtcagtgtggcgattcctcagggatctagaactacaaataccatttgacccagccatcccattactgggtatatacccaaaggattataaatcatgctgttataaagacacatgcacatgtatgtttattgtggcactattcacaatagcaaagacttggaaccaacccaaatgtccatcaatgatagactggattaagaaaatgtggcacttacacaccatggaatactatgcagccataaaaaatgatgagttcatgtcctttgtagggacatggatgaagctggaaaccatcattcttagcaaagtatcacaaggacaaaaaaccaaacaccgcatgttctcactcataggtgggaattgaacaataacacatggacacaggaaggggaacatcacacaccagggatggttgtggggtggggagagggggggagggatagcattaggagatatacgtaatgttaaatgaccagttaatgggtgcagcacaccaacatggcacatgtatgcatatgtaacaaacctgcacgttgtgcacatgtaccctaaaacttaaagtataataataataaaataaaataaaacaaaagaactagtttgttgagttcatttaggatctaagttgtaagaaatattgcaccagacaatttattttctgagatgaagctcaagtaagtatgagcacagtatcaggaatgacattcatttgttcccagctgtctctaggcattttgcactcttgaaaaatactaagttccctggacgtgaagagattcatgtatcagtaagaatgtgagccccttgagtgttcaatgtcccttcaaaccttagaaactgtaagtcaatgatggtgattctcacatcacaagagtatatatagttagcttcttttaaaagatataaaagacccctctgagttagccctggacacatattactccaactgcctgaataaatgtttagcgatccatacagaattactctcaattagatttagagaaaacattctctctttgaagaacactggaattggggaaaatatggtagaacatataggttattttgcctttgttactttgtagaccttaaatcatggagtgtgttagaacacagtatatttgtgacaaccatgacagttcagagaaatgcagtgacgtcatttactctgaaactgaaagacactaatctctgctctgagacccacaaaatcagattgtttgttttacctgcatgatttcttttttttttttttttttttttttttttgagacggagtctcgctctgtcgcccaggctggagtgcagtggcgggatctcggctcactgcaagctccgcctcccgggttcacgccattctcctgcctcagcctcccaagtagctgggactacaggcgcccgccactacgcccggctaattttttgtatttttagtagagacggggtttcaccgttttagccgggatggtctcgatctcctgacctcgtgatccgcccgcctcggcctcccaaagtgctgggattacaggcgtgagccaccgcgcccggcctacctgcatgatttctattcctctcattttgttgttctttttataaaacacctttgctaaataataaagttattactctaaggtagtgtccaggtctctttgataataatgaaacgtctatggccaaatcccattgctttgttttgacagtgtgctccaagaaaattactttgatatgccctctcatattagaataaatacattatacatgcctattgcctacatcaagttttgaattgtaccactttcaggtttaacctggccatacagcagattttcttaatggttggtgaacacggaataatattttattcagataaactattttgcagaaacatttaaagtcagatattgcagaactactgagtatctgaactttaaagggacactcttaaccatattttgttttatttagtactcacactgacaagttgatttaccacctcattttcccaacaagtgtcaagatttcaatatgcagttagtggtttctaaaaacgttgactatttaattacatccttatagtttcccaaaattgcttatagtttgtcctcatttagttaggtctataatatttctgaattagtgtaaaaatttctatgcctttttaattatcgatgcatataatgatgtataaaaattattatgtagatagctcctccaagaaaacttaaaatcaagagcttttagcatcaaagtatcagaatacaaactaaagaaaacacaccaatttggaaagattttctttaaatacattaaagtgaataaaatgttcacagagaataactcacatctaaggatacagacgttttcttaaagtgaaactatttttggctcactcagactctgggtagtgtttcactgattttgaatttcactggtcagaaccagtgttggtagtaagaattactgtcccagaagagaatggaaatgcttgccaactctactttcaacccttgttggaatccctatgttgtgggtagagatatgactaaattaagcagttttaagtctaagccagaaagatttaattattgatttattggttttacaattgttaaatattgcctttaaccaagtatatgttttatcatgtaataatcactttggcaacctcaaatgtcatgggttcacagggtaaatgttaaggtaatagctaaacaattgagagtaaggagatctaaagtaagtgaaaaaaattcaagatgtaatacagagtccaatatgacagacttgagaaactttcaaaaactaggaaaagaaaaccaaaagtcattcttgccgtgtctctgattgcactgacttgatgcagaattggtgcattaacatatgtatacattacatacgtatacatgtgccatgctggtgtgctgcacccattaactcgacatttagcattaggcatatctcctaatgttatccctcccccccgtctccccaccccacaacagtccccagagtgtgatgttccccttcctgtgtccgtgtgttctcattgtttaattcccacctatgagtgagaacatgcggtgtttggttttttgtccttgggatagttgactgagaatgatgaattaaaataaaaatgcatgcactttcaaatgtacttagtgcaacatattgaacttaaattccagttttcctggaattacctgtgtcttgagctaaaggctgtatttgatataacagggaaggaaagaaattatttttcctataaaattagtttaaaaacacatataattaaacaaaataaaaatattattccatcttttaaagaacatttactaattcacagatattacccgaagtttagaaagtcacctaagaacaattgtttaaaaattatttagggaaaatgaagcaaaattgttttcaatctgagattttaacagccagtgcactcctgttcctcagctgaaagtccccttcattctgaatgtctgcagtagtattgaattggggagcagttaggttccagggacatattcactcctgttttgttctcccatcaatctcagcctttcggtgactgtttgggcaaagcctcccttgtggtagaagatgcctcacttctggggagaagaggctcctcatcttgcagacaagaagcagcacccactggttcttgctccaaaagccattaacattataaactggccagttgcggtggctcaaacttgtaatcccagcaccttttgggaggttgaggcagaaggattgcttgagcccaggagtttgagtacagccttggcaacaaagtgagacccaatctctacaaaaactagagaaaaaatagctgggtgtggtggcactcacctgtactaaggaggctggactgggaggatctcttgagcccaggtggttgagcctgcagtgagccaagatcacgcctctgcacttgagcttgggtgacagagtaagaccctatctcaaaaaataaattataaactgattcacaataactttggttttgtcactaatacgctgaatatttttgttacaactaatatgcaaaatacaaactggctatcactaccattctgataatggaattagctctcctgcatacctgatgacctaatgcttaacctaatcttcctctttcacactttgatttggaaacttgttacaatagagttctttacctcaaagtcttaaggaattcaagacaagactagagtatgttaagataccacaaaaaaatgtacatagcaagagatttcttgagtaagcaaattttatacatataaaaataatttacatgcaaatgactaagaggaaatgttaagtgactctggtgtaaataattagttttctgattctgccagagcatattaagaaaaattcactttggcaaaattatatggatttaaagaagtaacaagtgggtttctctaaagtacagtttggctttttactagaatatcaagtcacttttttgggtgaggagagtacaatgggtatgggcagctggtgaaaataaacaattaaaattacttaaaacttcaacaaatgggatctgtatttaaacctgttttggtctatcttccctttgttttttctaatcccaacaatgcaaacctcagccactgtcaagggcaatctcagactggaggttgctgcctagggtgaggttctaggaagacttacaagcagagcttggggaaatgtctgcatgggaaaacagagccagacttagaaggcaatgctgatgaatcccattttcttactacagaagagctagcaaaaactgcaatatgatgtgtaaagtcagtgtaatcttatggacattataccaagtcacaacatgaggcatgagatacctcagatgttgttccctctaaatctcatgttgaattgtgatatccccaatgttggtggtaggtctggagggaggtgattggatcatgggggtggatttctcagaaatggtctagcgtcctgtccctggtgctgtccttgtgatagtgagtgaattctttcaagatctatttgtttaaaagtgtgtggtgctttccctgccttgccaggtgttgtgcctgcctgctccttcttcaacttctgccatgaataaaagcctcctgaggcctcaccagaagctaggcagatgccagaaccatgcttgtacagactgcagctataaaaacctcttttcaaacctattttctttataaattacccagtctcaggcatttctttatagcaatgtaagaatggcctaatacagaaaattggtactgagacatggggcattgctataaagatacttgaaaatgtggaagtgactttggaactgagtaatgggcaggagttggaagagtttggagggctcagaatacaggaagatgaaggaaagttctgaatttcttagagactagttaaatggttgtgaccaaaatgctgatagtggtatggacagtgaaggatagggtgatgcagtctcagatggaattgaggaacttactgggacttggaataaaggtcatgcctgttatgcctttgcaaagaacttggctacagtcttttcatgtactagggatctgaggaagtttgaacactcagacgcaggagcaaaaaaatgacttaaagttggaatttacaattaaatgggaagcagaccatacaagtatagaaaatttgcagcctgcccatttggcaaaggaagataaagcattttcaggggaagaatctaaacaggctgcggagcaaccacttattagagacatttgcataactgaaaaagctaggtgctgatagccaagaaaattaaaaaaaggccttgaaggcatttcagaaatctttgcagcagctcatcccaccacagacctagaggtctaggataaaagaatggtttcttttgtagtgggattttaaaaattaatttacttattaatttatttatttattttgagatggagtctcactctgtcacccaggctggagtgcagtggcacaatctcagctcactgcaagctctgcctcctgggtaatttatttatttattttgagatggagtctcactctgtcacccaggctggagtgcagtggcacaatctcagctcactgcaagctctgcctcctgggtacatgccattctcctgcctcagcctcccaagtagttgggactacagctgactgccaccatgcctggctaattttttggatttttagtagagatgggttttcactgtcttacccatgatggtctcaatctcctgacctcgtgatctgcccgccttggcctcccaaagtgctggggttacaggagtgagccaccatgcccaggctgtagcgggattttttaaggaatcagagacaccaatagggttgaggaagatatttattatttaggtgcaccggcccagtcagattaacatccaaaggactgagtcctgaacaaagattcaagttaccttttaagcgttttgtggggtggtggggagtgggggagatctgtgcacggggaagcatattacagaagcgagaaacaaagacagttattcaattaattgagacatgcattatattatttcttacttttcaaggaaaaacatgttttacgacttgagtttctctgtctagtgaacttgcagctgcacagctagagaaacaggttcttcacaatgcctgggaaaggaggagagatgaggctcactagccacagcaaaacaggcagttaatttttaaaggactccagctctttctgtttctcagggggaattgggttttctcacatacagctgagtttctgcttacacattttttaatttcttttaattcctgttccacttggtccagggccagggcatcactgccctgtaccacctccaggagggagttccttgcatcctggcccttctagctccaggcttggttcaaagggctgcagatagagctcaggccattgcttcagagggtgcaaactataagccttggtggcttccatgtggtgttaagcctgcaggtgatcaaagtgcaagagtgaaggaagcttggcattctctgcctaaatttcagaggatgtatgagaaaggctggatgcccagagagaagcctatgcacagctggagccctcaaagaggacctcttctaggacagtgccaagtggtaatgtgggattggaggccccacactgtgggggctgcctagtggagctgtgggagggggggctgctgacctccagatcaaagaatgatagagccaccagcagctcctgtcttcagtgtagaaaagctgtgggagcagagctgcccaaagccttgggagcccaccctatgcatcctggtaatgctctatgttcccaggatgtgggacatggtttcaaaggagattattttggaacatcgagatttaatgactgccctgctgggatttgaacttgtgtggggcctgtagtccctttcttttggccaatttatctcatttgtaatgggaaagtttacccaatgcctgtatcccagttttatcttagaagtcaataactggttttgattttacaggctcattggtggaagggacttgccttgtctcagaagaaactgcactttcgagtgatgccaaaacagtttgagacttttgggggactattgagaagggatgattgtattttgcaatgtgagaagaacatgagatttgaagggccagggatggaatgaaatagtttggatgttataccctttaagtctcatgttgaattgtaattcccactgttggaggtggggtctgttgggaggtgatggggtcataagggctgatttctcatgtttagcaccatcctcttggcactgtccttgcaagagtgagtgagttctcatgatatctggctgtttaaaagtgtgtggcacctctccctgcttgctcctgctctggccatgtgacataccttcttttgcttcaccttctgccatgtgtaaaagctccctgaggacccttcttgaagccaagcaactgccaatgcaaagcttcctgtacagcctgcagaattgggagccaagtcaaccttttttttcggtataaattacgtagtgcttaggtattcctttatagaactgtcatagtacaattatagcaagaatgtcataatacaaggcataatggtttgcattttaaaaatgaaaattaaatttatgtaatttatcatgaaaggatgaaatgagttaataatgagtaatatctacatgttgtcttagaggtgctgacaatctgtcaaggaattacatgcacggatcaagcagtttaccttcaagttgaataacaaggtattcctatctaacataacaaaattttgacattatttgggagactggaaataatgctaagtaatatcagattgtcaaagtcaaataaatatagagacaaacatctgaaattaaaatgttttatttgagatacaagtataacaatttcacacatacatgcagaatgggtgtctttagtatgtccaaaagataaagagaaagttagaggttttataaaaacgggagacagagagaaaaacggtatgtatttctctttgagaaagttcactggcaccagtaaggtttttaagagctggtaggctctgataggtgagggacagtggtgggtaaagctagtcttagtgttcaagaggttgttgcagtaaccatttgataaaactggcttcagcttaaagcaggtaatttcagcagccaggcatgaagagaattacgcttttggagtggtgtttttgccctgaatgcctcctccccctggcttcttgatggttttatttggtgtgacaagaatgacccaattcatatgatcaatttttacatttacccctttccatcaagaactttctcttaaagcatcaaccatgtttatagttgtacaactacaagttaggcttaatcatcacttagtgctaggatggacctgtctcagttgctccatcccacatctgggaaaggtatggaggtctacatcaggtctatgtcaagatttatggcctaaaatgtctatccaaggaaaaaataaaactgaccagtaatcccaggagagaaacataccttggcaaattcgaagatatttctaattttatttaacaattttaaaattaattaatgtatcaaagattcacccaactcatgtcaaacaaaatatgtttgggttaattaatatatattttatatggacattcctttatttaaaacatccttttttcctagaatgatggattaggggatttcagtgtgcctcagccagttggaagtagaaaaataagcataaagataaactttgtgaacttcaattcaagaagaaaaataggaattcacaggaatagaaaagaacattccagacactgtggaaggggaggtgggaaggcagcctctgttataacatttggttcataaaagggagtgaaacaccagtacgagagaagagcagccagtctccctctgcaactcacctttccactggggatctgtgcaatccagattaagggagagcactctgtttctcccaagccttggagctagcacaaaagaggctgagatatggggaaagaggaaagacactcagaaaagctgcaggcatttccccagacctgggactgagagaaggatgccctttttaatctgggctcatacaaagtcaatcattgttttgtgcctggcaatgatggccactgcagacactttaatcttgggctaggaattggagtgcttgctctggagcaggggagcagcctccaccgccagaattgagtgttgagtatggaaagtgccccaggagtaggtgttggaattaggctctctcctcttgcaggactgtagtgggaagagagttcctaaagcagaggtttctcaaggatggtgagacttgcagccaagaacaactttgcaacctggaactggtctgtgtgtgtcattgctgggtgtcccagcctactcccttggtcagttgacagagtactccatcagctccaagaaacaggagggaggtgaaccccattccccaggagacctaaactttggtggggaccagccctaagggaaggaggaatacagcttgccaaacccaccccttggataaaaggaaacacgatcatgacatcagctgctgaaaggggcacaccaaagcctgggaacagatttagagaggtagtcatctcttgccctctgtccccttcctagtgcactgctgcagacccagcagtggtcatcctgttggggcccaaggaacgtgggctgaaagaggctgcttcttaggtttctccagcagctctgcccctgctgaagactagtacacactgggacagggcgcttttggcactttgtcacttctgtacctgtcgaggacaagtacacagaggagaagaccctgcagccagctgtcactcttaagcactgtttactggactgaagccttgattacaccaccaaacaaaaatacatcaccacaccacgccaccacaggagcctatctgcaaccaaggaacttgtacagagccttggtcctctgaaagtacccagaaatgaagcaaattgatcctatacaacacacaccacagtcatacccttaagaaaaagaaagaatgaaaaattaaaaaaaaaactccttccaaatgatagcaagttcagcaaaagtagcatcaagtctctcagatgagaagaaaccagcacaagaactctggcaatacaaaaagccagaatgttccatcacctccaaaggattacaccagcaatctaacaaagagtcctaaccagaatgaaacatctgaaatgacaggtatagtattcaagatataagtggcaaaaagaaaaatcaccaaaatccaacagaaagttgaaatccaacaacaaacccataacaacgatcctggatttgaatgacaacatagccatattaagaaagaaccaagcagagcttcttgcattgagaaatttactataggaatttcaaaaaacagctggcagccttagcaacagactagaccaaatagaagaaataatttaagagctcaaataccagacctttgaatcaaccgagtcagacaaaaataaaaaaagaatttaaaaataatgaaccaaacttttgagaaatgtaagattatgtaaaggaacaaaatctatgacttattggcattttttttttgagacagaatctcactctgttacccagtctgtagtgcagctgcatgatcttggctcactgaaacctccacctccttgattcaagtaattctcatgcctcagcctcccaagtatctgagattacaggcgtgtgccagcatgcctcagtaatttttgtatttttagtagagatggggtttcaccatgctggccaggttggtctcaaatttctggcctcgggtgatcctcccaccttggcctcccaaagtgctgggattactggcatgagccactgtgcgtggctgacttattggcatttctaacagagaagaagagaaagtaatcaacttggaaaacgtttttgagaacataattcaggaaactgtcctcaatcttgctaaagaggtcgacatgctgatacaagaaatccagagaactcccgtgagactgaaggtagacagtgaagcaaatgcttgctttcttgtgtggctctgattagcatcaggatatctacattttacataggaaaggagggagcagaggaaacagttatgcattcatctcgcattcagtaaatctccattttacgtaagataaagtaagcatgtaaatagagggagtggagtaaaggaatactcaatgattcattcatctcaggataggcagagggatgatttctcgtcctgaccttgtcccagaactatgaaaataagctggtaattgagattctcagggtgaaattgagccgactcacttttagggatagtttacaggtgggatgtgcattctgaaaaatttaggggctcacagcaaactgtgagggaggacatctgaagagacatgcggccttctgtcactgtgggaacctcgcttatggatgaggctatgacacagggttgtgaagttataactatgtgtttgagaacaaggaaagcagtattgcataactcagttcccaagcttaattttccctttgacacagttagcttggggttggggtctctattctcttttctctcacaaaatcatatgggaacattccagaaaatgtgaggttctgtgctcactattaaataaaaatgaccaggagagccatgggtaagctccctcctcagtcatcaggaccccaacagagagttttcccctgtgtggacagggtcctgaattctacaggatcccgtggggacacaagtgtcaggatagagacattcattcagccaggcacagtgtctcacacctgtaatgtcagctacactggaggctgaggtcgccttgaggccaggatttcaagaccagcctggacaagatagcaagatcccatatctaagaataaaattagccgggtgtggtggcatgcacctgtaatcctagttacttgggagggaggctgaggtgggaggattgcttgagcctaggcgttggaggctacaacgagctaggattacaccactgcactccagtctcggcaacagtaagatttcgtatgtaacaacaaccaaactattctgtgttttgagtgtaaattaccatagccattgtaacagaaattaggcagcaactcttaacattcaaaatgcataagcaatttggctaagcaattgtacttgtagattatttatttatttatttattattgggacagagtctcactccgtcccccagactggagtgcagtgacatgatctcagctcactgcaaccactgcctcgtgggttcaggcaattgtcctacctcagcctcccgagtagctggggctacaagtgcgcatcaccatacccagctaatttttgtattttttgtagaaatgggtttttgccatgttggccaggatggtctcaaacttctgacctcaggtgatccacccacctcgacctcccaaagagctgggattacaggcactaggtccctaatttagagccatattctttaatgtctaaaagcactcttgcatatttattactgcattgtttgaacttaaatatccacaacaggataacaggataattaaacaatttattgcactatggcacatccatctgttaacaaaatgaaatcgatctttctgtactgcggtggaatgattttctgaacatagttcaggtaaaaaaaagaccactgttgaataatgcttctggtataacacaatgtgtttgaaaatgtacacaatactctgtaatatccaatgcatacatctatcaaagtaaatatattttattctagggtaattattaaaacattaagaaatactctttaatcatatatgttaaaacttgtagaaaatcaataacatacaagtaaagaagttcaagaagccaaaaaaagtaattccgagtgtagaaagcatggtgagaagtgatggaacaaaactgcagaaatttaaaatgcaaaattaaaatacataattcttaattaaaatacataattcttcattgaaccccgaatctgtcaggatgtatgtgtgatcttggacaacacattcaacctcctcacactgaattttcttgagtgtaaactgttttagagatgttcctcacccggttgcatgaagcatatctgtgtgtgttaaggcacttcccacagcatctgcgacacagaacagtgacagctgtgctcttcgtggtccctgcacacaggcccacagcagtatattgtgtgtttttttttttatataaaagctttgaaaatgccccacagcttcctcagtaactgactgtcaagaggggcagccttcaaaagtagaattctggcaaaggtcttcaaaagacacgaaattctggcaacgggcccatttccctctagccttgctcttctggatgcatccattctctcccacagcatagtcgttttcttccactccactgtagagactgtccttctagtggcaacagtgatttgagtgatatgcggaaatttctttccaagcctgttggagaagcgtcctctgcctgcttctttttggccacctcctgccatggtaagagcagagggcctccagggctgctctgtcacccccaacagcatggacctcactgcagtcactccggaagcttccctctaaaggaagcttgtgcaggaaacatcatgcatggagcagcatggggacaggggctggccagctgggcaggtctcacactcctgacactcagactccacgatactcctctgtccccacccagggcagatccctgccctaaaactttcccccctcatgtccagcaaatgctgcatggagccctggaattctatgtggaaagctaggaagggggagagctgaaatgaagatgtaatcaccctttccaaagaggtcagtccggtactaagctgtgctcctgggcaagctctccaggctgagggaacaggagcaggggttatgttgggtgaaggtggaagtgagggacctcccaggaggtgtagaatattccactagggacacctcatacccttcgaggattagaccttgaggcctggagatccccaggcaattagtattgaaggtcgaaaggccagtgacaggaataggaaggcccactgtgtcattcacaaagcacttccaaacccatcatcacaggtgaccctcacaacaaccctgtgagacctgcagggcaggggctctcacaaaggaggagtcaggaatgtcaagactttaacaccttctccaagtcaggatcaggaaatgctgtcccagccctgacctatattccctatgcttcctcccacaaaacagcttagggtgactgccaacttgtgggcagagaccctcactttccaatccccacaaggggctgtgcagtggggaggatgaggccccctcctctgactgtctcctccaagaccctgttttctgaggaaggtcactctgggaactgttggcctctgcagatgggggcctggaccgtgtggaaacacgacgtgaaggtcacacctggcaggcaccagtgctggagggcaaacctcacctttaaaaactcacactttttattttaaatttatttttatttttaatttatatgagtacatggtaggtgtatatatttatggggtacatgagatagtttgacacaggcatgcaatgtgtaataatcacatcagggtaaatggggcattcatcacctcaagcaagggaaatgccagatgcttataaaaccatcagatcacatgagaactcacttactatcatgagaacagcatgggggaaactgccgccatgattcagttacctctcactgggcctctcccatgacacatgaggattacggaaattacagttcaagatgagatttgggtggctacacagccaaaccatatcaccttataaaattaataaagtggaaatagcagcgggcctgagtcctggcacctgccttgtgatgccccctcttgaggagggcctggcttctgtgccatgcagaaactttcctgtgcttcctgtgggcttggggtgagccaggtcctcctgggggagctgggcacttgtgggacaggagggtccctggcctggggggtccatttgcctccttaccccatcaacaaaacaccggaggagccaactcaacaaacctcaatgtacggcccttcctggaccctaggtgttcagggccccctgagctgccctgggcagaacactgggcagtggccagtgcttccccaacaactcccccatgcacagatgcctggtggacacacttcccttaaccatgctcagctggagctcagcccccatcctagtacctctgccttctcctccagggcatgaaaaggaaacccaactccaaacccatggagaatcctcatcttgggtgaggccctggctgggactcagccccttgtcaggccctcgaggagctccatcttcccctgtttccctgccacatgggacccagggcctgtgggaaagagttgagggtgttgtccactcagcaggtactgcatgatctttgggaaggatttgtgttatacctgctcctggtaggatagaaggctccggagctggggagtatttgggctgtagaaaactgagaagcccctgacccatcatgcatcagagcccactcccaagatgtggagccgtcagctggaagagctgggcagtggcaggggaccccgcaccgtgaggccttcctcctttccatcaggtgaccctaatatgtggcctcagctctagggaggtgggccctagctggaggcactgcacagcagcatcctgggtagaggtgccaggagggcaggcctgcctttgaggttatgaggaagggctgaggcaggcagtggccagtggagggaacggggtgggtaccgagggactacatggccatctcctggacatggggtctggctgggggacatgagatgggcagacactgccatcttgatttcattggcccatctgtgggctgggaggccagctggcggtgtggccagctgggaggtaggaggactcttggggaagggagagtcacctgcatgaactcagggctagagggctgtggctctgggacacacagggtggccagggggaggctgcagcgccctctgctgttgggaatgaaaggtgtctgccttgaagtgaaagggtccctgttcagttctgggttcctgtgggaccctcagcagggatatcctgaaggctcctaacaagctggaaagcaaggatggtgccttgcctggaagtcaggatcgcccagccagggtggccatcccatggcctggctgtgtgaggccctgggggtagttgtccgcctaccctgcagggagtgtccctcctcggccatcagctgatccagtgcccagaaggtgtcttcctctggcagatacaggaggaggatggcagttaggcagctcatgtccctgtggtagcccacctcctgcaagagccagagtcaccatggaagcatgtcacctgagagggatgaggccttctgggaggactcgtgtcactggagaggacagaggtcacctgggagacctccctcaggccctaggggatttagggcacagactctgcacccctcccctgaccctggacatgagggctaagcaagtcccccacaactcagttgaaaagggacctgtagggacttctgcagtgagtgtccaacctcacatggtctgaaggggcacaggcaagggtcattcacatcccctatcatgggccaggctggaaaggccagtgtgccaggcctggggaagcacctgtgaactgcacctaccacaagggcaggcggtgggccactgatcaccacacaatggatcgtgtgatggcccaggagctgcctgccaggcacaggagggcagctgggtccagaccctatgtgagcagcccgtggagtgatctcagcagctctccctgtctggaatggtctgggaagtgggggccaagcaggaacagccacctgggtgacctcctccctgtctactgttctcttacggggttaaggcaaaggggaaattggatccctgccaggtttccaataaagaggcttcctcaggattcaaactcatttcatgagaagagcctggccccatcaggcacctcagcaacttgtcaaacatgtctcttgcaaggactatcctgtgtgcaacactgctaagctccttgttttgggcagcaccaggaggggagggtcatttcttcttctgagacatggtggttgggtccaggtgacatccacagtctgggccctgacccctttcactctcagcgggaccccttgagacaccagcttcccttccttgcttgggtgtccacaccagcagttctacctactacatcattacagccagatcaggatcaatgtcctctctctggaataaatgcagtgaccactgttctttgagcattatttatcttaaattattgttttaattagaaatgtatttcacttatattagccaaatttcctttcaatgtaaccaaatttcttttaagtgaaaattaaatatttaccttctgctatcaagcattctatgtacacaaaatgtttatttttttcaactttagaaaaaattgaaaatgtctacatgctactaatctaaaaatacaggctctgggtttatatggtgtttatctttcttccaaattttaaggaatagatacttaaatggcatccactttgttttaaaatacataaaatgttttaagcttttgacctcaaaatttacagtagcaaagctactccgtaatgaataaaccacagaatcaaaacaaagaaagattccacagaccagtctaaccaacaatacaattataaactagttgttcaaatatcaaaaaccaatttcaatgacaaatgaatggtatgaaaaccccgcaaatgtcaagtagaatatattatacttgaatgaaatcatgagttgagagtaggaaatctaggtttaaccaagcaaattaaataatgtttatgaggaaattatactgctaatgttttattatttggcaagctattcagtggaagacaaagatattcttaacgaagtcgaaaatatattttaaaatgttactgaagtggattaaaaaataatgaggacatgaataacttttaaaagtattcggcgataaagagagaaaaataaatttagatttcatacatacataaaatatatttaaaaagttgtgttttctggttgctcaaataaaaggagcagatatttaaattccatgcctttcattttaaagtttaggaaatgcttatagctttccacactgacatttatactgacacagttaatctaatcgagtgataacaaaatcaaaacaagcagaattctcttgagcaatctattttcttgatttttaaaagtcaatgtactctcaaagaaacaaaactcttattcgtggattctgttatttgaaaacatttactgatcatttaccttacagcaagtgatctccagctcgtggaaaaatatgtaaagttgcccagctgcattaagcttaaactcttctgaaggagaaaagaagcaatggagtagggacattaaagcaggagtgtggtgatatggctgagacttctacttgcacactgtggtagctgtgtggagaatggattgaaaaaagggcaatgacagaagcttaaattagtatcaaatatggcaatcctgtaaatttaggtgtccttgaaataagaaaaatgtataatagttctcattatttccccaagaaatctctgcacttggccttgtgagggaagcgctatagttaccaagtggtgggggtgggaaggtgaatttgaaacaacatttggaattactacactttaaaggtaaagctgacaggaattccatacacgtcagatctgaaaatgtgtgtgtgtgtgtgtgtgtgtgtgtgtgtgtgtgtgtgtgtgtgtctgtctgtgtgtgtttgtgtgtgtgtgaagcagggagaaagagcaagagtgaaagtgagcaagagagagaggagagagagggagagaatcagacagatacagaaagagattgacagagctacagagacagaattgaaaggggacaccaagaatattgagctgagaaactataaaatgggagttgccattaaacagaatggggaagagcaaatttggggagtttcagtggctcaatatagacatattaattttgagattcctaactgacatccacgtggataagtcagggagtgttgggtgtagtgtccagtgtttaggtgtaatatgaaatatcaggaaattaatgacacaaacattagtaagaaagcaaagataagaagtcgaagtcctgagcctaatggtcctctaacatttaaaaaatagaaaagatgaaacctgcaataaaggactaggggtaattatcaaaaacatggtgggggaaaagtaggttaagtattctggaattctataaaaaagttttacaaagagaaggtggagatcaactgtgtgaaatgctgctgatatataaattaagacgaaggccgaggagttatggttcaatttatagtttaacaatatggatagcacttatgttttaatacgagcagcttcgttggagtgagtaggtgagaaatcatattggagtggttgctgaaatgaaagtctgatctctggattcttaaggaaaaattttattggactgcagagacataaattggatttttaattctggagtcaggatgtgctcagtaaacatgtgcccattaatgcctcctcacatttttttagctcggtattctgttatcttttaataatataataatgacttgcaaaacctacacccattttgcagcaaaccgtgacacatgtatacctgtgtaacaaacctgcatgttctgcacatttatcccagaacttaaagtatatatatacactttatatatatatatatattctctctctctctctctctatctctctctatatatagagagagagacagagagagagacagacagacagacagagagagagagaaagaaatcccagccaagtgcggtggctcatgattgtaatcccagggctttgggaggctgagacaggtcgaccatctgagatcaggattgagaacagcctggccaacatggtgaaaccctgtctttactaaacatacaaaaattagctgggtgtggtggggggcacctatagtcccagctacttgagaggccaaagcaggacaatcacttgaacctggaaggcaaagactgcagtgagctaagatcatgccacagcactacagcctgggtgacagggtgagactgcctcaaaaacaaaagcaaaaaacccttttaattgacaaattttacaaagactgatactagaggttgttggacaggccgttgtcccacataatatcttaagagttgccgatgcacaagtaaggtggtaaaatgcctttgaaaaactgaccatacctgctatactttaatattcagatacaaaactcccagaaattccatcttgtcatttatttccacaagaaaaaacaagagacctgtattaaaatatccatttctattaaaattaatcacactaggtttcttcaaatttttttattagtagctcttgttttcagcagtacaatttctaatatatatgtgtatatatatttaatatatatatgcacatatacatatattatatatgtatatatattagatatatatgtatattatgcatttacatatatgtatatattatatatgtatgtctatatgcacatatgtgtatgttatatagatacaaatatgtatatatgttatatatatacaaaaatgtatatatgttatataaatacacaaatgtatatatgtaatatatatacatattatatgtatatatgtaatatatatacatattatatgtatatatgtaatatatatacatattatatgtatatatgtaatataaatacatattatatgtatatatatacataataatatgtatatatattagagttttgctcttgttgcccaggctggagtgcaatggtgcaatctcggctcactgccacctccacctcccgggttcaagcgattgtcctgcctctgcctcccaagtacctgggatacaggcatgtgccaccaccctcggctaattttgtatttttagtagagattgggtttcactgtgttggtcaggctggtctcaaactcctgacctcaggtgatccacttgcctcggcctcccaaagtgctgggattacaggtgtgaccactgtgctcggcctattttgtattttttaatctacaacactctaagaacacatattttaaataaatttgtacattcagtgcctagaacaaaaccagcattttgtagattccaaagaattatttgttgtataaatgatgaataacttaaataagttatcatttataacatctatatacaaacaatatattacctgagaatacagtgataacatttgttatgtataaaatgattgcaatctcagttaaaaaatattttttgcatgagttattgtcatatgcagatgctcacattgttttgtttagatgaaaatgtttgtaactactatgcacatttttgttacttaagccttttggtcttgctgccgtagcaaatactgtgcctcttaagaacatgaacctgtttttcttcattttttagcagatttcttaatgaaatatatagcatactattttgtttaacacataagcagacaccctgtcagaagcaaagagacatctacttcaccattaccacccatccctctgctaatgtggctgctgaagatgttacctagagcagaggactttgtgttcagcctaagcactttatatcctttattttcaattgggtaggagataaaataattcagcagcaataaaagtcacacttcttaaagttgcagtctcaccaatgcaccacaatgtagcagtctctcttgtgaggtatcacgtggagttcttcatctcaccaccaagatgattaaggaacagggacacacgggtgaggttggagtgaaagtttaataagaaaaaggaggaagctctctgcagcagacaaaggagtccaactggattgccgtttttactgttgaatcaaaaagcttttataagaaactcctctcagctctatataaaactgtctgcacaattccctttatatatccagctgtgggtatgtgtctagtcaagcataaagtgggcttctcttgtttgtataactgtgggtttgttttaggtaagcccacctcctccctgtgcaagttcccacagaggccgccatgtatatgcctgaaaaagggaggaaaattttacctgggagcttgccaattacacaaagacagaaggcatgtgtgctggaccttgcatgcttatctgttcaggacttatctgtaggtgcagtagttgtgatttttcaggctgacagcttccctgaggaccagtctcttacttgtttactcaactaattttcctttccttctccctcaacattatgcagcaaaacagagtacacttctctttcccagtaaaccaggttggtactccactctgaatacttgtattattggatttcttagaaaaaaatatttgggatcataatttagatgccatcaaacaatgaacaaaaacatgctacttcgtttcccttctcttctcttgttaccagacaatagctagttttcttttctctccaatcccttttttctgtgcttctacctgatttttgaaaaaacttctacacatttccaatcttagtatagcagacatcatatatgtggtcaaactacatacgtaggaagaatagaattatataattatattcaagcattttaaaataattacccttcagtttgttttgcagttattttacataatcaaatgtcttcctgatatattttccaacccagtggttgtcaagctctgctttgttttctaattgcatcagaattatccacaagtctttttttttttttttgagatggagtcttactgttgcccaggctctagtgcagtggcgtgatctcagctcactgtcatctctgcctccctgattcaagtgattctcctgcctcagcctcccaagtagctgggactacaagtgtgtaccaccatgcctggctaatttttgtatttttagtagagatgaagtttcaccatgttggccaggctggttttgaattcctgacctcaagtgatccactgcctgggcctcccaaagtaggaattatccaaaattcttatgataaatatggataaatcagcacaactcaagatttaagaaataaaaatttccaagagaagaaacccaggaatatgcattgaaaatgactccctcaggtgattctgatgtgatatgtggtctgagtttaaaatgcaaggaaaattaccttccctgccctccagttggcccttatgtccagatgtccctcttcccctttctcattgtgctctctccttctgtgcctttgttctattctctctccacttctcatccagatgccaagccctcttccatcaattgtcttaaaactccaaatggtcagttgcctctaaactttcctctgtcccatgaacaagttactcaggcaaacgtagaatttaagcttggaccaagctgaatcaagagctgcaattaaaggtttccctaagcccagaggggaccagcgaatacttatagaagattttggatttcctctgaatgcataaggctctgggtaacctaattctatagaccaaatgttattgtccccctcaaattcaagtgctgatatctaattccctatgtgatatttggaggtagggccttggggaatgattagctcatgaaggcaggggccacaggagtgggattaatagcccctattgaaggcaccatagagagctctctcatcccttctgtcatgtgaggacatggtagaaacatggctgtctatgaaccacaaagcaagcccacaccagacatggaatctgctaaccacttgaccttgaattttgccatctccaaaactgaaagaaacaaattggtttataagcttcctcatctatggcattctgttttgaccccagattagctaaaaacaccaaaatatcaacttgtacaccaaattttggaaatggatgctaaaactttgatggcaaaaggtgactgatctgcctgagaaacgaagctacatgatccctcttttcacaaagctggagggagagtcaacacaagcaaaaataggtcaaattcttctaaaagccatacctgaagggttttcaatatcacttgatcagatcgtaatttaatcacacaaagagccataactaaacacacaactatcagaggttttcaatgtcaccttaaaaacatcatctacaatattagggagtgaaagaagtcatggaagtttcaaaaagtcaaactttatttcagtgttatggtagaaatttgagattcttagttaagctatgaataaatccttgggcaggtgcaggcatggagattctggggtgcagctgctgagtttaaatcttcctttggagatgccccctggccccctcaacccctgtccacctgtcaagaagaggccatcctgggcagaacattagaggcaaatggcccagatgcctagctgagggcaaacctccatgcctggaggaggaggtcgcctctgggagcaggaggacctcctggaacccctgctcacaggctccttttcttgctctccagcacctcctgtaggcaggcaaacaaccccagcagcagtagcagcaggctcttcagcagcagggctgctgctctgctgaatgagagaagtccctctccagtgaggcagaggagcccaggttgcacaccctggtctctgcctccatagcttccactgtgcccaggactgggagcagtgtgggagctgctggctggagctgtgctggtcaccccctctctgccacctctagctccagccacactttcagcttgggcagtcccagggcaatggcaggagggctctggagcctcctctagctccagcgctgtccctggagggggctttgaccctggtgctggcactggctccacagctggcactggaaatagctgtatttctgcacctgaagcaggaactgaaaaaggagagaggtcaccaatatcactcactttccactggaatttccaaacatgaaaacaacctcactgaatttaaaggtatttcagcctgaaaacattgtccctggaaagacttccagactgcaggtgacctcagcatgtgcctgtgtctcaatgagctccagaggctccagctggacaaggacaatgtgcagatgtggccctggtgggatcactgtgaggcctggcctggtagctccatctggggcctgatgtctacctggtgactcctgtcctgtggtacctgggggggccttctgctaaatggccagaggcatctggggtgagggatgagcctacaagggcatcgtcagaaaagaaaggttctcactcctgccattcctgaagcaggagccttgagatgtgcggatgcagcacaggaacatcttgctctcttgagcatctcccaccaagtgagctggctatggggctaactctaggatgtgggtgcctggttatcgggattcttttttttttttttttgagacatagtctcattctgttggccaggctggagtgcagtttcatgatctcagctcactgcaacatccgcctaccaggttcaatcaattctcctgcctcagtctcctgagtagctgggattacaggcacaagacatgcaccacaacacctggctagttgtttttttttgtttgtttgtttttttttttttttttgagacagagtcttgctctgtctcccaggctggatggagtgcagtggcgcgatcttggctcacttcaagctccgcgtcctgggttcatgccattcttctgcctcagcctaccaagtagctgggactacaggcacctgccactatgctcggctaatttttgtatttttagtagagatggggtttcactgtgttagccagtatggtctcgatctcctgaccttgtttgttttttgtatttttagtggacatatggttttaccatgttggtcaggctggtcttgatctcctgatttcatgatcctcctgcctcagcctcccaaagtgctgggattacaggtgtgagccaccgtgcctggcctggttaccagaattctaatttccgttagggtctgttgccaaggaagtgaggtcgcttctttaaggttccgtccccttggcctcctccttccagaagacctactcaggaccccagtgggctgctgactgctcaccttccccacaggtcaactccttacctgtacacagttatgtccacccagggcctgcttggacacctgcacctgatgttccccaggggcctaggaatccacttggggcctgggaacctacaggggcctaatgttaccctgcagattgggtagccacctggggaccaggcatcaacctgggtactgtggttgacctgtgggctaatgtccagctggggactggttattcacctgaggcctgatgcgtacctggggccgaatgtccccctcagggtgaattccacctcaggcctgtatgtccacctggggcctgatgtctgccttagatctgtgtcccactggggccttgtgttcaccagggactggtatccagctgtggcctgatgacctactgcatcctgctgctcacctacggcctggtgtctacctggggcttggtgatcacctgggagctggatatcaacctggggcctgggtgtccacttaaggcctgatgtgggcctggggcctgactgtccacctggggactgggtgtccacctggggtctgatgtccacctgaagttaggtatttacctaaggcttggtgtctacctgtgccctgatgtccacatgagtctggggtttggttggggcctgctgtacatctgggaacttggtgtctatctgaggcctgatgtgtacctggtgactgcgatcctcttgaggcctgctatccacctgggaatggtttatccatggaaacggttatgtccacctggggctggatgttgcccagcggctagatgtccacctgtggccccgtatccacctagggcctgatgtccacctggggcatggtgttcacctgagacccgggtgtttacatagggcctgatgtccagctggtgcctaggtgcccactgggggccttgtgttaacctggggactggtatccagctgggtcctaatgaccacctgggttgaattattcacctagagtttggtattcacttagggcttgagtgtcagccttggacctggtgtccacctgggccttgggtatcaaactaggggtttggtatccagttgagacatcatttgcaccttgggtctgagtgttcgcatgaggccagatgaccactgggggcctgaatgtcaacctgggttctgaaattcactggaagcctaggtatctagctggggcctgatgtccacctgggactaggtgtcaacatgtggcctgatgtaaacctctagttgagtgtccaccttgggcctgatgtccactgggggactgatgttcccctttgatctgatgtctacctggaaaccgtgtattcacccatggcctgatggtcacctggggttgaatgtccaactgtggccagatgtgcacccggatcctgggcatccacctggggcctgatgttcatctggggcctggagttcacctgaggcacgatgtccacctgaagcctaatgttcatctgagtgctgagtctaatgtactcctgggttctagggtcctcttgggacctgatgtctaccagatcctggtatccacttggggcctggtatccacctaggacttgatattcacctggggcctgggaatccacttgataactggtgcccatcagggtcctatgtttaccttgggactgggtaaccacctgaggcctgatgtccacttagggcataagtgtttagctggggtctagtgttcacatagggtctgatgtcaaccttgagcccaggtattcaccaggagactagtgtccagctgggaccagatgttcacttggggccaggtgtcaacttgaagcatggttgtcaacctaggacctgatgtctagtccagtgtccaccttgggcctgtttactacccggggcctgtgtgtccacatagaccctgatgtcaatctggggcctgggtatttaccggaggcctggatattcattggtacattatgtctactggagtctttgtgtcaatctgagctctgatgtccacttagagattgggtatccacctaaggcctgttgtttacatggggcctgtaacaagaggttccagatgaactcagatgtccacctgaggcctgatgtccacctgagttctgagtgttaacacagggcctgctgtcaacctgggacctaagtatttacctagggcctgggtgtccagctggggcctgacttccaaatagatcttgtgtcaacaggtggcttgatgtgcactttgggcctaggtaacttcctgatgactaatgcccacatggctcctaaggaccatctgaggcctggtattaatttagagactggtatacacctggagtccaggtatccacttgggacctgatgttcacctggagtgtacgaattcacgtggggcctggtgtccaccttgagtgtgtgtatccaattgagtgctggtgtccacctggagtccagtgtatacccggggactgatgtacacatggggcctgggcatccatctaggacctgatattcagataagggctggcgttctcctggcctggtgtccacatggagcctggatatacacttggagccggatgtcccaggtggatacctgggccccagtggtcatcagatcctaggaaactctcaggccccaggtgcacataaagctccaagtgaccacctaggccacaggttgatacacagggtccaggtggacactgggtgcaagatgaacaccaggcccctggtgaacacaaagccccaggtgtctacctagtcctcaagtggacaccaggcactagattgacacacagataccaggtggacatcaggctgcaggtgaacatcgggcctcaggtggttgggttacttatagcataggtggccatcaggtcccaggtctatatccactccccacctgaaaatcaggatccaggtggatacccatattctaggtgaacaccagtttccaaatggacatcaggctccaagtgaacacacaggccccagttcaataccagcctcaggtagacatcaggacccaggtggaccccaggcccaatgtgcatgcctagtctcttggaatacatcattttcaacgtggacacccagattccttgtagacgtctactgccaggtggatatctggctgcaggaggacatcaggccccaggtggagacccagtacacaggtgtaaatcaggctgcagtatttcatcaggccccagttaaacacttgactaaaggtgtgcatcaagacccaggttgacacccaggcttcagtgcacactaggcccaaagtgtacacctgtgccaaggtgggcatcaggcccaaggtgtacaccagactccaagtggacatcaggttccaggttgacaccagtctctaagtagatccttaagccccaattggtcatcaggcccaaggtggatagattgaccccaggaggtctccaggtcccaggcaggcctcaggtggacactaagccctagattaacacaaggtctgagatggtttcagcccctgtgtggactttagtcataaggagcttacctaggccctaagaggacatcaggccccaggttgacacaatgaaccatgtagaagtcaggctctaagtagacacccaggccctaggtaaatactttggtcccaagccaacatcaggccctatgtggacacccagactccaggcagatgtcaggccccaggtgaacactgaactcagggtggtcctcaggccctaggttgacacataggccacaggtagacaacaggcataggtgaacttcaggctaaatatgaacgtcgggctccaggaagaagtctgtgccccagttaaacaccgggtcttaggtagacatcaggcctcaaatggatgcccaggccccaggtggatataaggcctcaggcaaacaccagatcccaggtagacattagacacaagatggacactcaggccacaagtgaacatctgttcccagatggacatccatcccaaggtggacatcaggccagagatgtacacccaggccccaggagaaccccaggccccaggaggacactcaagcgccagaaggacacccagtccctaggtaactaaaaggccccaagtggacatgatgttccagatggatatgaggccccaagtggatactaggcccaggtggaccccaggtctcaggggcacaccaggccccaggggaacaccaggccctgggtaagcatgcagtcccaggtggacatcaggtgccaggaggacaccaggacccagttggtcatcaagccacagctgaacaccagttccccatgaacaccagtcctcaggtgggcacctagtcctcccgtgtgcatcaggtgccaggctgacatatgcaccagctgaactctgggcctcaggtgaacatcagatcccaggttgtcacccaggccccaagtgaataccaggttttaggtggacacgaggtcctaggtggatgtctatgctcctggtgaacctcaggccctagtggacactcaggccctttatagacatctggctccttgtgcactcccagggcccaggtagacatgaggacccagaggaaaaccagtccttagtcatctaacactgaattcccctagggctggagactgagtattcaccttgggcctaggaatctacctggggccagatgttgatctggggcctgatgtctactcaggttcagctgtccacttagggtggggtgtttttctgggacccagagtctacctgaaatcttggtatcaacctggggcctatgtgtccacttggagtctgatgtgcacttgaagcctgaattttcacctaggatctgatgagcacttggggcgcaggtttccatctgaaaatcaggctctagttatacatctgggccccaggtataccctggacaccgaaagaactccagcccctatcttaacatgaggtcctaggtggatgcccaggcgtcatgtctacattaggcctcaggtagacacgactccaggcgggcatcaggcctgatattggctctatgtctccacccaaatctcatgttgaattgtaatccccatgggttgaagaaggggcgtggtgagaggtgattgaatcatgggggcagacttcccacttgctcttctcgtgatagacttcttacgagatctggttatttgaaagtgtgcagcacatcccccttctctctccctcctcctcccccatggtaaaaagggcttgcttcctcttggctttacatcatgattgtaagtgtcccgggcccacccagtcatgctccctattaagcctgaagaactgtgggtcagttaaacctcttttcctcataagttgcccaatatcaggtagttttttataacagtgtgaaaatggactaatacaagaccttaggataacaaccatgcttcaggccataggtggacatctggctgcaactggacactattccccaggtggatacctaggctcaaggttgacattagtctccaggtaaacaacaagccccaggtgaatacctatgccctaagtagacatcaggcctcaggctgacactcagtctaagctcaacattaggctcaggtggacacccagactccaggtggatactagaccccaggggaacaccagactcctggtaagcataaggccccaggaggacactagaatccaggtgtacataaagccactggttgactccaagccctcagatgaacaccaggccaactagtggacattaggcacatgagaatacttgggcaccaggcaggtatcaggccccgggtaaacatcaaacttcaggtggacatcgttctccatgtaaactctagccccagctaaacatcaggctccaggtggaagcccagaccccaggtgcacttctggccacagttggacatctgtccccaggtgaatatcagaccatggatggatagcaagtccccaggtggacatcaggtcaaaagagaatataagtctctaggaagacatctggccccaggtggatactgaactagaggtttacatcagaccccagattgacattcagtccccaggtggtcatgacacctcaattggacaccaagtcctcaggttgataaccaagtcccaggtggacaccacgtcaaagatgaacacaagacctaaggttgtcattcaagccccaaatggacaccaggccctaggtgaataatatgacccaggggatcattgggacccagctgcataccagtccccaggtttacacgaggccccaagtaggttcctaagctctagttgaacatgaggtctccagtagacacccaggactaaggtggacatcaagcatcagatggacgtctggctgcggatgaacatcaagcctcacatggatacctagtccgcaggtaggcatcaggccccagtttgacatcagtttctgggtggatccttaagccccaggtggatatccagtgtccagctggacatcagcccctcgtggacgcccagtccccaggtgaatatcaggtctcagatgaacacaagtcctcaggcagacatcagacaccaggtgtacactcagaccccaagaggacatctgtccccaggttgacatcactctcaaggtgtacattaagccacagatgtacacccaggtccaaggcagacacgagtccccagtaaaactcaaggccccaggaggatactcaagccctaggtggatgcccagaccccaggtaattacaaggccccaggtggataccagattccagatgaacattaggcctcaagtggatacctaggcaccaggtagacaccaggccccaggtacatcccctggtctcaggtgcacactaggtccccagtgaacactggctccaggtaagcacccagtccaaggtagacatcatgacccaggtggtcattaggccacagctgaacaccaatcttgagtgaacaccagatcccaggtgggtacctagtccaggtggatattaggccccaagtggacacccagcccccaggtgaacatcaagcttcaggtggacatcatgcctcaggtgaactccgggtcccagcccagctgaacatcaggctgcaggtggatgcctaggttccaggtgcacaacaggtcacagttggacattcagccccaggtgaacatcaggccatgggtggataaacagtccacaggtggacatcaggtcaaaggtgaacatcagtactcaggtggacatcaggctccaggttgacatcaagcccaaggtggacactgaactagaggtttacatcaggccccaggttgacacccaggctcaggtggacattgggccccaggtggatacctaggcccctagtaaacctcagattctaggttgacattcaggcccccagtagtcatttggccccaagtggacactcaggcgccaggttcacatgatgccttaactggacaccaaggggccagtttgatacccaagtcctgtgtgggtgccaggtccaaggttacactcaagccccaagtggacaccaggccctaggtgaataatacaacccaggtggtcattaggccccagaatgacaccagcccccaggttaacaggaagcccccagtgggtacctaggccccaggtggacatcaggcctaatgtggacacccaggatcaagatggacatcaggactcagatggacatctggtgacaggtggacaacaagcctggtgtgtaccttgtccccgggtggtcatcaggccccagttcaacaccagtccctgggtggattcctcggctccaggtggacatctggtcttcagctgaacatcagaccccaggtgaacaccaggttttaggtggacattaggcccctggtggacataaagtaccagtggacatccatgctgcaggtggacacccagcgcccagatgggcatcaggccccatttggacattgaggccccaggtggatatcaggcctcaggtgaacccaaggtccaacatagacatcaggccttaggttgacactcaagcaccagatggactgctgcacctaagcagaaaatagactcctatctggatatgtaagatacaggtatacaacaagccccaggctgacatccagaccccaggtggacaccataccccagctgaacagcaggcaacagtttggcaccaagtacctaagtgaaacaaagccttaggtgattaccaggccataggtagtcattagtctccagctggacaatagtccctaggtggatacctaggccccaggtggacactagatcccaaattaacacaaaaaccaagtaaaaaatcaagcccccagtggacaaccaggccctaggtaaatacacaaatctcaagctgacaccaggccctacttggacacccaagccctaggtggacttcaggccacaggtgaacactgaactctagaaggtcttcaggccctatgttgactacctggccccagggggacaccaggcatagatgaacttcaggcaccagctgtacatcaggttccaggcaaatgtcccggccccaggtggatatcaaacctcagatgaacaccaggccccaggtagacatcaaaaaccaggtggacactcaggtccctactgaatatccatccccaggtggacatccatcccaaggtggacatgaggccacagatgtacacttaagcctaaggcagaccccaggccccaggaaaactccaggctccattagagcactcagacctcaggtggatgcattggtcctaggtaaatacaaggccccagacagacatcaggccccagtgaacaccggagcccaggtggatacctagtccccagctgtgcaacaagcagaaggttgacccagtccctagctgaactctgggccccagctgaacatcataacccagatggtcacccaggctccgggtgaacacacggtcttaggtagacatcaggtcccacatgaacacccaagccccaggtagatatcaggccttaggtgtacaccagacctcaggtgggcatctggctccagatggccataggtggataactaagcctctcctggatatcaggccccaggtagacaccaggctccaggcgaacatctagccccagggggacatccagcccccggtgaacatcagggatcacatggataaacagtttacggatgggcacctgccacaggtgcctcacctctactccctgaaacctcacttcccctcatgggccttctgtccgacttggggtacccctagccgccctaggcacacactggactcgaaccaggggcgccagcatccctggggctcagcgcaagggttcatgggaatacactttcgtccgtgggggacccagtcctcacttctcggcggcacagtttttttttctctgccccaggtgcctcaccttcccctcatgggccttctgtccaccttggggtacccctagcggcccgaggcataccctgggctcgaaccagggatcccagggtccccggggcgcagcgcaagggctgatggggagacactttcttctgtgggggacccaggccccgcttctctgaggcgcgttttttttttttttctgccctaggtgcctcacgttcacctcatgggccttctgcccgctttggggtacccctagcggctccaggcacaagccgggcttgaataagggtcgccagggtccccggggcccagcgcaagggttgatgggacgacactttcacccatgggggacccaggccccgcttctccgcagcgcggttttttttttttttatttgccccaggtgactcaccttcccctcatgggccttctgtctgctttgggttacccctagcaggccagaggcgcaccctggattccagccagggatgccagggtccccggggcccagtgcaggggctgatgagaaggcactttcgtccgtggggtacccaggccctgcttctctgtggcgcagttttatttttttcttttccgcctcaggtgccttacctctcctccctcaaacctcaccttcccctcataggctttctgcccgccatggggtaccccaagaggcccgaagcgcacccttgtcttgaaccagggatgccagggtcccctgggcccagctcagaggctgatgggaagacactttcgtccgtgggggaaccaggccctgcttctctgcggcacagtttttttttttttctgcctcaggtgcctcaccttcccctcatgggccttctgcccgcttttgggtacccctagcgagcccaaggcgcaccctgggctcgaacgagggtcgccagggtcgacggagcccagcgcaggggctgatgggaagacactttcatccgtaggggacgcaggccccgctactctgtgcttcggtttttttttttcctctgccccaggtgcctcacctttcctccctcaaacctcaccttccactcctgggctttctgcctgcgttggagtacccctagcgacccgagcgcaccctgggctcgaaccagggatgccagggtccctggggcccggtgcaggggctgatgggaagacactttcgtccgtggggaacccagggcccgcttctcggcggcgcggttttttttctctgccccaggtgcctcaccttcccctcaggggccttctgcctacgttgggataccctagcagtcccgaggtgcaccctgggttcaaaccagggacgccagtgtccccagggcccagcgcaggggctcatcggaaggcactttcttccgtggggtacccaggccccgcttctaggcggagcggtttttaatttttttctgtgctccaggtgtctcaccttcccctcatgggccttctgcccaccttggggtacccctagcaggccgaggcacaccctgggctctaaccagggatgccagggtccacaggcccagctcaggggcttatgggaagacactttcgtctgtgggggacccaagctctgctcctctgcagggtttttttttttttctcttccccaggtgcctcaccttcccttcatgggctttctgcccgcctttgggtacccctagcgggcccgaggctcaccctggtttggagccagggatgctagtgtccccggggcccagcgcagcgctgatgggaagggacttttgtccgtggggaacccaggacccacttctccgaggtgacctttttttttttttctgccgcaggtgcctcacctctcctccctcaaagctcaccttcccctcatgagccctctgtccgcctagaggtaccgctagcggcccgaggcacaccctgtggctgaaccagggactccagggtccctgcggcccagcacaggcgctgatgggaagacacgttcgttcgtggaggacccaggccccgtttctcagtggcgtggttttttttctctgcccgggtgcctcaccttcctctaatgggccttttgcccgctttggggtacccctagcgggccctattcgcaccctgcgctcgaaccagggtcgcagtgtccacgaggtccagcgcaaggcctgatgggaaggcactttcatcactggggacccaggccccgcttctccgtggcgaggtttttttttttttctctgccccaggtgcctcaccttcccctcaagtgccttctgcatgctttggggtacccctagcggcccaaggcgcaccctgggctcgaacaatggaagccaggttccacggggccaagcgcagtggctgatgggaagacacgttcttcctcggggacccaggctctgcttctctgcggcgtttttttttttttcttttccccaggtgcctcactttcccgtcatgggctttctgctcgccttgaggtacccctagcgggcccgtaggcgcaccctggtttcgagccagagacgctagggtctccggggcccagtgcagggctgatgggtagggacgttcttccgtgggggacccaggccccacttctgggcggcacagtttttttatttttttctctgccccaggtgtctcacctttccctcatgggccttctgtcttggggtacccctagcaggccgaggcacacgctgggctccagccagggataccagggtccccggggcgcagtgcaagcgctgatgggaagacagcttcttctgtgggggacccaggccccgcttatccgcggcgcggttgtttttttttttctctgccccacgtgcatcaccttcccctcatgggccttctgcccgcttttgggtacacctagcggcctgaagcacaccctggtctcgaaccaggtacgccagggtcccctgggtccagcgcaagggctgatgggaagacactttcgtccgttggggacccaggctccgcttctccgtggtgcagttttttcttttttttcctgccacaggtgcctcacctctccttcctcaaacctcaactgcccctcagggatttctgcccaccttggggtacccctagcaggcccgaggcgcacccgaggctcgaacagggtctctagcgtccacagggcccagcgcagggactgatgggaaggcattttcatccgtgggggacccaggcccagcttctcctaggcgcggcttgttgtttttttttttttctgccacaggttcctcacctctcctccctcaaacgtcaacttcccatcatgggctttctgcccgacttggggtacccctagcagcccaaggcgctccctggactcgaaccatggatgccagggtcgccggggcccagcacaggggctgatcggaaggtaccttcatccgtgggtacccaggccccgcttctcaaagctgcggttttttttctccgccccaggtgcctcaccttcccctcattggccttctgcctgctttggggtaacacgagctggcccaaggcgctcccgggtctcgaaccagggtcgccaggttctcgaggctagcgcaggaggtgatgggaaggcactttcatcagtggggacccaggcccggcttctcagaggcgctgatatatatatatatatatatatattttttttttttttttctgccacaggtgactcacctctcctccctcaaatctcactttcccctcatgggctttctggcttccttagggtaccctagcgtgccggagtctcttctgatccttgaactagggtcgccagggtccaggaggcccagcgcaggggctgatgagaaggcactttcgtctgtgggagaaccaggccccgcttctcctcggcacgtttgtatttttctgccgcaggtgcgtcacctctcctccctcaaacctcaccttctcctcatgggccttctgcctgctttggggtacacctagcgggcctgaggtgcacccaggcctagaaccagggtcgcctgggtccacggggcccagcgcagggactgatgggaaggcacttttttccatgggagacccaggtcccgcttctccgtggcgtggtttctttttcttttctgccactagtgcctcacctctcctccctcacagctcaccttcctctcatgggctttccaccgcgttggggtacccctagtggcccaaggctctccctgagctcaaaccaggaaccccaggttccccggtacccagcacaggggctgatgggaaggcactttcatccgtgggggacccaggccccacctctccacggcgcgggttttttctttctttttctgtgacaggtgcctcacctctcctccctcaaaactcaccttcccctcatgggctttgtgcgcccaaagccccccttggggttcacttagcggctgaggcacaccctgagctcgaacaagggacaccagggtccccggtcccagtgcagggactgatgggaagacactttcgttcgtggggcacccaggccgtgcttctccgcggcgaagtttttttttttttctctgccccaggtgcctcaccatccccttaggggctttctgcccaccttgcagtacccctactggcccgaggtgcaccctggggtcaaaccagggatgccagggtccccagggcccagcgaaggggctgatgggatggcactttcatccgtgggggacccaggcactgcttcttggtggcacgtttttttttctctgcctcaggtgcctcaccttcccctcatggaccttttgttcgctttgtggtaccccaagcggtcccgaggcgcaacctgggctcgaaccagggtcgccagggtccaccacgcccagcatagggcctgatgggaaggcactttcatctgtggtggacccaggccccacttctctgaggcgcggtcctcttttttttttttttctgcccctggtgcctcacctctcctcccacaaacttcaacttccactcatagggcttctgtccgagttggggtacccctagtcgcccgaggcgcaccctgggcgtgaaccagggatgccagggtccctggggcgcagcgcaagggctgatgggaaaaaactttcgtctgtggatgacccagacaccgcttcgcggcgcattttttttttctttgccccaggtgtctcaccttcccctcatggaccttctgactttctgcacctgctccggcgctgtgggcctccctgcgcctgcgccggcgctgtgggcccccccaccccccggcgcctgcgccggcgctgtggccccccgccccccgcgactgcgccggcgctgtggggcccccacccccctgcgcctgcgccggcgctgtgcaactttgcgagggcggagctgcgttcttcccagcaccgacacggagagcatcgccggggcggagctgagttctcctctgcacacacttcggagatacagcaaaggcggagcagtgttctcctcaacacagacctgggcaggccggggtctccgtgagggcggagctgcgttctgctcagcacagacccgggggacaccgcgaaggcagagtagcgttctcctcagcacagaccttgggggcactgcctcgctttgggacaactcggggccgcatagacgctgaataaaatccttcctgtttgcagccctgagtaatcagggtcagcgaccagtaagaagggttcagtgtggaaaagggaaaccaaaagcccctctgaatcctacccaccgaggttctccccagccaaggcgaggcgccgcagtgcgagatccacaccgcagcctcagaagacaaatgcagcattcctaatgcggacatgacacccaaaatatgacacgcccattgctcatgtaacaagcacctgtaatgctaatgcactgcctcaatacaaaaatattaatataagatccgcaatccccttgctgccatgcagtcctaagacagatcataataatcaacattgacatagtcaatacaaacgtagtaacgaacctagggttaaggttggtgttagggttaggggttaggggttaagtttagggttaggggttggagataggtgttggggtcagagttaggagttaagagtcaacgtttagagttaagggttaagagaggttaggggttagggataaggggttagggttggattagtgtgagggtgagggttgttgttaggggttaggcttaggggttacagttaagggttaagggttagggttaggggttagggttagggtcaggggttaggggtcaggggttaggggtcagggtcaggggtcagggtcaggttcaggggtcccactctgtgagttgtctatttactctgctgactgttccctttgccatgcaaaagctgtttaattaagtcccagctatttatctttgtttttattgtatttgcatttgggttcttggtcatgaaatccttgagtatgtcaatgtctagaagggtttatccagtgttatcttctagaatttttatagttcaggaattagatttaagttcttaatccatcttgagtagatttttgtataagatgagagatgagaatccagttttattcccctacatgtggctcaccaattatcccaacatcatgtattgtaaagggggtcctttccccactttatgtttttgtttactttctcgaagatcagttggctgtaagtatttgggttaatttctggattgtctcttctgttccattggtctatgttcctatttttaaaccagtacattggtgttttggtaactatggccttattgtacagtttgaaatcaagtagtgtgatacctccaagttctttttgctaaggcttggtttggctacatggctctcttttggttccatattaattttagaattgtttttgtaattctgtgaagaatgatggtggcattcagatggggattgcattgaatttgtagattgcctttaacagaatggtaattttcacaatattggttctacccatccatgagcatggggatgcgtttccatttgtttttgtcatctatgacttcttttctttcttttttttttttttttttttttccagagggagtttcgctcttgtcgctgaagtgggagtgcgatggtgtgatctcggctcactacaacttctgcctctcgggttcaagcgattctcctgcctcagcttcccgtgtagctcggattatacgcatgtgccaccgttcttggctccatctatgatttctttcagtagtgttttgtaattttcattgtagaggtcttttgattcctttgctaggtatattcctaagttttttgttgttgttgttgttttttgcagctattgtaaaaggggttgagttcttgatgtgattctctgcttggtagctgttgatgtatagaagagctactgatttgtgtccattaatcttgtatctggaaactttgctgaattcttttatcagttctaggagctttctagaggagtccatagggttttctacgcaaaagatcatatcatcagcaacaagtgacagtttgacttcctctttaccgatttggatttcctctatttccttcttttgtctgattgctctggctacgacttccagtactatgttgaagaggagtggtgagagtaggctcctcgtcttgttccagttctcaaagggaatgctttcactgtttccccattcagtattatgttggctgtgggtttgtcatagatggcttttattacattaaggtatgtcccttgtatgcctattttgctgagagctttaatcataaagcaatgctagattttgtcaaatgttttttctgcacctgttgatataatcatattagatttttttaattctgtttatttggtgtatcacatttattgacttgcatatgtgaaaccactcgtatatcattggtatgaaacccacttgatcatggtggattattttttgatatgttgttggattcagttagatagtatgttgttaaggattttggcatctgcgttcatcaaggatattggtctgtagttttcttttttggttatgtcctttcatggttttggtattagggtgatgctggcttcatagaatgaataagggagggtttcttctttctctgtcttgtggaatagtatgaaaagtttggtatcatttcttctttgaatgaaagaagacattctttgaatgtcttgtagaattctgctgtgaatctgtctggtcctcggctttttttgctggtaattttaaaattaccatttcagtcttgctgcttgctttattggtctgcttggggtatctaattcttcctgatttaagctaggagagttgtatttttccaggaatttatccaactcttctaggttttgtagtttatgtgccaaaaggtgttcatagtacccttgaataatctttattatttcagtggtgtcagttgtaatatcccctgtttcatttcttagtgaggttatttggattttctctcttcttttcttggttaatcttgctaatggtctatcaattttatttatcttttcaaataaccaactttttgttttatttatgttttgtattttttgttgttgtgtcaatttcatttagttctgctctgatcttggttatttcctgtgtttgctgggattgggtttggcttgttcctgcttctctagttccctgagatgtgaacttagattgtctatttgtgctctttcagactttttgacgtaggtttttaggactacaaagtttgctcttagcagtgcctatgctgtatcccagaggtcttgataggttgtgtcatccagttcgaataaattttttacatttccatcttgatttcatttttcacccaatgctcattctgtgaggaacaaccaaattgttttctgcagcaagggcatcattttctattcctagcagccagttcatgagggctccaacttctccacctccttagcaacatttattttctgtgtcattgttatgaaacccttacttgtgggtgcagagcggcatgaatgaagtcaattaacatgtttattacctcacagaatagttacctttttgtgtgcatgtgtgggataagaaaacttaactctatcccctgtgactgaatagtggccattccagctgctccaggctccagcagaggaagaccggggtaggtggctccaccagggtgatcctcaggtctggcgctcacgcattccagaggccacccagaccatgctccgccgcctgggcgcccaagctgcagtcgccctctgtgtgcaggcagcagctgcctggcaacccccgagcccgctcgcgctcccaccataatatccagggagggagagaatgattttattttattttttttgagacagaccctcgctctgtcgcccaggctggagtgcagtggcctgatcttggctcactgcaagctccgcctcccaggttcacaccattctcctgcctcagcctccctagtagctgggactacaggcgcccaccaccgcgcccggttaattttttgtatttttagtagagacggggtttcaccatgttagccaggatgatctcgatctcctgacctcgtgatccacccacctcggcttcccaaagtgctgggattacaggtgtgagccaccgcgcctagccagagagaatgattttactccccatatcgcaggggatttacattcccctgcgttatttttcataatatccagggggaagatgaagatattactccccatatagcatgggagaacaaatccctgcgatattgttcataatatctctggggggagagaatgatatttctccttttattgcaggaagtgtacaccccccttgcgatattgtttataatatctagtgggggagaggacgatgttactccccatattgcagggtgtgtacaaccccctagaatattgttcataatatccacgcggggaggagatgatgttactacccatatcgccagggtgtactgccccctgccatattgtttgtaatatccaggctggaaaaggatgatattactccctgtatcacaggggatgtacacctccctgtgacgtaatatccagggtgggagaggagtatattactccctataaggcagagtgtgtatacacccctctgtgatattgttcataatatccactgggagatatgatattactcccaatatcgtaaacacctcatgtgtacaccatctgtgatattgtttgtaatatccagtaggggagaggatgatactactttccacatcccagggggtttacacccctctgtgatacagtttgtaatatccagatggggagagggttatattactcctcatatcgcaggacacgtacacccgcctgtgatattgtttgtaatattgttcccaatatcattttcccccatggatacaggaacagcatcgcataggacttgtacaccccctgccatactgggagtagtagtgttttatcccttgctggacattaggaacaataccatgggggggtgcacagcccctgtgatattgacagtaatataatccactatcccctaaatataggaaaaatatcacaagagggatgtacacacttggtgatattgaaagtgatatgatcctctccctacctggatattaggagcaatatcacagaagggttgtacactccctgcgatattgacagtaatatcctctacccccctggatattaggaacaatatcacagaagaggtgtacacccactgtgatactgacaatttcctctccccccctggggatataaggaacaataccacgggggggtgtacaccccctgtgatattgacagtaatatcatcctctctcccccagatattagtaacaatatcaccgaaggggtctacaacccctgtgatattgacagtaatatcctctcccccccagatattaggaacaataccatgggaggatgtacaccccctgtgtcattgacagtaatatcaacctctccccccaccggatattagaaagaataccacgggggctgcacaccccctgtgatattgggagtaatatcacccactatcccctaaatattaggaacaatatcacaaggcggggagaacaccctctgcgatattgggagtaatgtcatcctttccctgcccctgcatactaggaataatatcacaggggatgtacacccccatgcgctattgggagtaacatcaccctttcttcccatggatattagaaacaatatcacagaagtggtgtacacacgctgcactgtatagaacaaagcaggcggaggaaggtgggataaccttgctagctgaagcttctggctctctttttttcttcttcccgtgcaggaaacttgcttcccttcttcctgcccttggacatgagactccaggttcttatacgtttggactctgggacttgcaccagtggcttccccgaggctctcaggcccccggcctcagactgaagactgcactgcgggctttcctggttttgaggcttttggacttggactgagccactactagcttctctctttccctacctggcagacagcctgttgtgggactgccttctaaccgtgtgaaccaattctctctggtaaactcccttatacatatacgtgtatcttgttggttctgtccctctggagaaacctgactaatacattttgtatatttttcctccactgccctttcctctgcttctaggcttacctagaccaccaccattctttccccctttctaaagtaaaagttgtttttttctcactaaatgcatggtattctgcccattttccatggcttccctcagccctgctctgtttattcttgctatcttaagaggaaatccctgcctctttcatggcttttctcacttggtctacttactggtttctgttgttctcagagacacactgagacctttcacatctcactgtcacttcttggaagggctctctacctcgtctgcctgctgagcaacctcttggagtgacgcgggcactcttgagtcactgaacttgagctatttggtgttagtatgttaatttatcttcttagaccacttaccacttccttaacttcaaaagaaaagaataagtattattttccatggttgatatgaagagtagaaataacttatacaaaatacattgcagttaagtgataataaatggctgtgaatgtccttattaatgttattctatcagtctcagctcagataccatctgctctgtgagctctgctctgaatcatatctgcttcttctctgggttccttgtgctctgttcttaactactttaaagcagtaattgttctgattctaattagtgatgcttcccaataaaattttaattttgtagatctcttccccccacccctgccccagcctaaccagtgttttcttacttttttgtgtacaggctacatcactggtcttcttttatttgtggctaaataaatgttgtgttagaagagtaaagagttcccagttacatgggatctatagttctacaaaatgaatgtatacataatccatgtaaatacttcacttattttaaaacaattttttaatttttaaattaaatttaatttgtgcatgtgtgtgagaccagagtgagaacagagatggcggtggtgaggggcagtggtctcaccatgttgcccaggctagtcttgaactccccttcaagtgccaccctcctcacctggcccccctcaccttgcctcctcccctctcactcctatgccaactcctgccattccctaccccctctgtagactgcaagactcatcaagtgacttgctgagcaaactctgctgagaagagatctgtttagggacacaggaggccaagtacacaaaaaagcaaaagaactagcatgcctttttcaatggatgtctattttacagggctggcttcagattattatagctttaaataaaaggaccgttttgtcatctcggcccatggcctacattatttctttactgtccattgccctgggcacttgactaataatttaacagcagttttttttttaattttaaatcatgattcattgcattgctgtaagagtaattagaggtaaagtagggcttgaaactgcctgtagttggttacttactgagatcttagcatcattgtcaggtgagagggtgaagttttaattagcgctaagtgggatagaaattcaatgcactgaaactgcagtgtccaattcagtaggtgctagtcacctgtaactgttgagcacttgtaatcctggctagtcctaattgagatgtgttgtgttaaatacactggattttgtcgttggagtgggaagaacagtgtagaatatctgcttgattttttttatatttattacatgttaaaattattactatgattactatttgggacatactgagttaagtatatttaaaattaatttcaccttttcttttaatggggcttactagtacatttaaaattacatacgtggctcacatatttattggacagcacagctctagaagtttaggaagaaataagaaaaatattgagaataggtagcgacagtaggaagtttgacctcctgtaagactgattccaataaaactaataggtgatagttttaattggctttttcctactagaagaagtaagtgtactttacatgcctctttgttctccctctttccccttcaatttagtggttagcgtgtatttactacatcaggcttaatattcactaaacagtgttaggaagacttaggtaaatgattccctgatgaacacacttgatattcaaagcactttcctaacccatttttaattggaatagagtcaaatgtagatggcttattagtagtcatctcatttaaatctcatggaattttcctactaaatctcaaagtaaacaatttgttataggctgttttgtcaagtttatggaagggacagcataggacatgtggtacttcatttccaaattgcttgagatggttttcattataatcatacattatttgcttctggttttccagaaaagccagctaaacctgtggttcatttagatataaatgaaatatccacaaaggattgctcaaagtgacttatgcaacttgaatatatattttttctgtagggtgtttattccaaattatctggccatttgctgcaatttgcagttttttagaaaacaccaaatatttctcaagttagagatgttttaataaaaacagtcatattgtactggcagcagacaaataaaatggccctttatttcacagttgagaatttgaaattggaaggtaattaacatatgtaaggatgatgtatttgctgcctggcttataggaatgagccaagttgttttttgaggtatgttgttgctgtgtatgtcccacctattttgcttccttaatgaacaatgcaagtttgagacagaaatatttgagaacatttttatcagttgtgacattttgatagtgaacattttatatcttctgtcaacttaaaatgtttgcatcttctgtcagcttaaaatgtttaatttgttatagccaaataatttggctataattgataatttaatttatcaaattaaattgctttttttccctttagactttcttcagtcacatctgaataaatcccttagaagtaagctagatgtaatataatgaaatgcttaaaagggctgtgtatcttcatattacacttacagtgattttctcttgtgcccattatattctacctgcagctagttgaggtaaagagagggcatttaactgtcaagggaacctgtgaggagactgtagaaatctggaaagtctcttgagtctttgagggattttgggatgcagagagtggggctgggatctctggctaggttggagccagcctgcatttgtatctttatcttggaagcaaacttagaatgcagagatagatgtggcctggatgctgctaactctagccaaccactaaatcttaaggtgggagagatgcagcctttggctgggtgctaagctgctgtagctggttgaatgtagaggtcactatcttttctgaatatttgtaagtaaattaaatcattctttactcctgtatgcctgccaaccaaatgggaaatcgctatagaaaagatggtttaaattttagtctttgaagtggtttatgcacgtttctggaatcaagatttaacgcggacttggattggatattgaatatttttgatttgtctacttttctctccatagggagcttatagcttcattgcactgtgtgtggcatttgggtcctgtttgacagcaatgactgcctttctgtttagtgtctgtgtgctatgaagattgcacacaggggtccagatgcatcctgttttgagaatgttaatggatacaccagctgctgctttggatttcacccattggtggtagtggacccgctgtttggaatgcagacaatttaagtgaagacatatccatatatgtggctctgttacaatggtgaaatctacaaccataagaaggtaggggaaaagaagccagatgtgtggatgtgattaaacttcagagcttgttggttacgatgagattatatattctgtatcatgctttttactttgcaaagcattctatgttatctcatttgctctaagtatgtagatagggaactgatgaataaaatggtgagtgaaatcacttggtcacaaaaaagtgataaaaatggggattacacagtttctttgactcttagaattttttctccttctccccagctttttgttttgaaaaaaattctaacatacagaaaagaacagaatagtgagcacctagattgaataatcattaatgttttgccatatttgcttgatttttctttctacacacacacacacacacacacacatacacacacacacacagttttttgccaaatcatttgagagtatggtgcagattttgtgacactcctaaatatataagcatttatctcctaagaataaggacatttttctacataacatcaataccattattaaacctaagaatccataatatcacctggctgggtgcggtggctcacgcctgtaatcccagcaccttgggaggctgaggtgggtggatcacgaggtcaggaggttgaaaccatgctggctagcacggagaaaccccatctccactaaaaatacaaaaataaaaaaaatcagccaggcgtggtggtgggcacctgtagtcccagctactcgggaggctgaggcaggagaatggtgtgaacctgggaggtggagcttgcagtgtgctaagcttcagccactgtactccagcctgggagacagagcaagactctgtctcaaaaatgaaaaaaaaaaatcataatgccacctaatatccagttaatacttaaatttcgctaagtgtctggagaatttttttgttttttgagacagagtctcaactttgtcacccaggctggagtgcagtgttgcgatctcggctcactgcaacctctgcctcctgggttcaagcaattctccttcttcagcctcctgagtagctgggacgacaggcccacctgtcaccatgcctggttaattttttgtattttagtaaagactgggcccagggtggtctggaactcctgagctcagggaatctgctcaccttggcccctcaaagtgctaccaagaatatctttatagctggtatttgtttgtttagagccagatttcattcaagattcatgcatttggttgtgatgtttcttggtattttttctgagacttcttgatagatacctgtcaggcactgatagagagttatatcctaaccatgttttggacatttttatctctgaataatagcttttgtcattgtttgttgcctgctcacgggaacactcttaataatagtcttcttgttcaaaaagttttaaaatagttattcaagaaattcctttcacacatttctttattcctttattaaggacctaatatgcaccagatatcatttttctaggtgattgtagatgaaatggtgaaaaggaaaggcaagaatggaatttcctgctagtgggaagtagaagagagtattaaaacttttttctttctaagtcaaatcagtgtcatatgcatgagaaagctaggtagtatgatggcattatcagcttggctttctccttaaatgaaataggaagtgctctgttttactcagatagtgtttttttttctaaaaagctaaaataagttaaatattttgaaattaattaatttctgttctaaattagtcaaaagttatatttgtaaaactagagaagtttgttccattgcttctaccaagcatctcagcttatgtagttggggcagctagaaatctaatgaacagaatgcatattttaggcttatataaagtattctgcaacataaggtcaaaaataccccctaccccctttttgataaaaataaagcttactactaataataaaatacagccagaggtgtgctgggagtggagggggactgagttaaagaaagtaggaatggggtaaaggctggggcaaagagcagactctctccctgcaggggagtatcaggggtctgcagccaagttaaatgacagcatgacttcaggaggccagatttgagggcttttatctaagatgcagcatcggagtttggtttaagagagtaggaagtgatacatctgttacccaaaggacacttctctttttagaataaattacctgcagagtttaggccaaagaggtgggcaaggtagatttgggaaactgttgcttgctaatatcaccaaacgctttctttttatacttggtggaggctttaattggggcaaggacatttttatacaaagatagagaaaacaatcacctatggaatttgattccttgctccatgccctcgctagcacctctcaacatgcttgatgatatttaaaatttcttcctagggaaaaaacttttcatcccacaattagaatcaggcttaacttgctttttgaaaaggtagtaggcaatttgtgttaagatctaaattaccaagatttttatatcttgaaacagatttagatgatagagtgaggtcggtggtggtggtggttggtgggaaggggtagttttttagagagggtattaagagttggggttttcaatgtgagagaggtgaaggtttgaaaataagtaagaaaagcactaaaagggtgaagtcaagggcctcagagagccaggatgatagattctatttcacagtttaacacaggatcaccatagaccaaagcaagtttataactaaggcaatgaagatcatctgtctcctcccttccccattaattgtgaactttagttttataagctcctaagaggcagaaaacaaattggagactcgtcatctatttgggagtgtatggcatgtatttattgtcctaggtgctgggtttatttttttcagctaatgacagttttccatgctttatggtaagtgaccataaagtaagtggtaagtgacttacccttcaggcagttcagcccaggacagtcagcagaagactgtttccagaccccacctgctagttacagatcatccctgatagagcagagaggggtgaccaggtagtgactttatagtcactggaggcaaagcccatttttggacagttcattgagggcttacagataaaaggttcacaaattatgcagtgagctggatggagtgtgaagcgtatttatgggtcgtgcacatacataataggtttactttttgagatttcaaaacatgttttaaacttaacctaggattcccacctgatttaaacctcttatttctctaatgtcagccaaaaatgtgagtatgacatacaaagagaaatacatcaaggacttttcatcctcatagtttgccagtgatgctggagagtgtcagaattggtgagtagcctaatcaaactttcttgctctgcatgcagtggcagacagtccctttgctgttcctttggggcatgcagactaataaagtgccaccatcattttatctctcagtgagcagtagttttaatgctactgcagtggtgggagcactgggcgttgtcgtcctcacctgaggacaagcagctttgttttggatcatgtatctgttattgtgatggagccatttatttttcagggaatgacgccaaatgatgtttgtccctttgctttacatttttatagctaggtctttgaagctgaactggaggaacttcttagccaatactgtcttcttaaaccaaaagttgacagttgcagaagacacgttttttagtgtcacggcaaccaagcaacatattaccttaaattaaatttacaggttgagcatccctaatctgaaaatctgaaatttgaaatgcttcaaaatctgaaactttttgagcactgacatgacaccacatgtggattttgatgtcctagtcaaagtgcaggtgaacaacacacagtttatttgatgttctctaatgaaaaaagaccctctcagcccccttcagctgcagtataacttttctacacatgctcagatttccccatgcaagcacacacacaaagggtcacagaatggcacatgtgcaagctggacaagccaatggcaggatccccacagatgggacctaagtgcatgactcgttgtgtatttttcttattctctgctctgtggtgttagcatactgaaaatgtcaataaggcctgtagatatccctgcgagcagcaatgataaggaaaagtagaaacacttagaacacagaaagtcaagctgttggagaaattggactgtagtgtaaaggtatagatgacatggtgaaaatgtgtgatagagatattgaagatattgaaggactagagctacctgcattcataacagaacaagaggtcatgtcagtttataaaattaaagagagacttccaagacaaaagcccttgataatgaggcagatgactctggagaaacattataaaaaaccatctggcagaatgcctcctcagcctcagaggactcacctcctagttgctcaactcctgatatttcttctcacctaaaaaaagaaaaaaaatacaatgtacagtaaccttttaatcaaaacgcagccttgtaggtggagcctgaaagcttgccattgtttatacagctgtttaacagctgatgcaggtattctggtgatgctactgtgttgcttattattttttactgtattaatggcatgtcatatttttacttatgtgtgaataattgtgtgaaaatgattgctcatcagtagcatataaattcagagtcagaaatgatggtcagtgatgtcagacagccacagattttccacatggaagctgagatagtgacacctttgctttctgatggttccatgtacacaaactttgtttcattcacaaaattatttgaaatattatataaaattacctgtaggctatgtgtataagatatatgaaacataagtgaatttcacatttagacttgggtctcatcgccaagatatctcacgtagatgcaaatattataaaatccaaaaaaaaattccgaaaccctaaacacttctggttccaaacatttcagataagggatactcaatctgcatatataaaatatttatgtatcacatacatagtatgtataaaatatgaatttccattcctctacaggttactattctggtacattcccgttatattctgtttatcagactgcaactaaaactttcatgggttcagctttatgttgaacagaatttgcagaattatgagttgaagcaaaccctaggttgataatgctgtgattctcctaaatcaccaaagtgcatgaaatgattttaaagctccagaaatactgaagcaactttgtgataaaaattattagtggatgcacaaggagtctataatgtcttggttttgctattgcttactaaggtgcagcaccagtttgaatttgaataccagaccaaagtggatggtgagataatccttcatctttatgacaaaggaggaattgagcaaacaatttgtacgttggttggtgtgtttgcatttgttttactggattctgccaataagaaagtgtccctggacagagatacataaggagtcagacctttgtttaaagcagtgacagaagatggatttttggctgtgcgttcagaagctaaaggtaatagtaaatttacgtatagattttcattattgtcttggtcgtgtgttttcttttaaattatatctgaaaatctcttagcaatccagaattttacaagtgactaattaagttgtgagttcttaccttttttaaaaaaacagagtagttttactctccttttcagcacttaaattctgtaatccttgaaggatgggtctttagtgtagtcatttatttttggtgtgctaatatgctctgcatatagcttgatcgtaagtgcagttttaagttttcctgtgtcatactgtaatgatagggttggctctgcaattattgccctgcagtactttgctgaagttatagcacagcaaatattaggatttctaaaacagctttattggcagtttacatgccatgtaattcacccactcgaagtatatagttcagtggttttcagtatattcacagatgttgggaaccaacactccaatcaattttagaattgtttttccacctcaaaaaaaaatcctatgccctttagcttattttctttctatttatttatttattttaagagatggggtcttgctcagtcgaccagcccaggctggagtacagtggtgtaatcatagcttagtgcagccttgaactcctgggctcaagcaatcctcccatctcagcctccctagtagctaggagtacaggcatggaccacaacaccctgcctcctgtgccgtttagctttcaattctgtctctccacatacatcatctgcacccccgcagttgtagcactggcaatcaccaatctttctgcctctggattccctattgcgtgtgtttcatataaatgggattatctatcatatgggcttttgttactggattctttcacttggcataatgcttgcaaggtttgtctatgctgtgacatgtatcagtacttactttttatggccacatgatactctgttacatggatacactggattttgtttatgcacttgtcagttgatggatatttaggacattgtttaccccttttggctattatgaataatgctgctataaacattggtgtataagtttttgtgtagatatttgtcttcggtgtttatctaggagcagaattgctcagatgcatataactgtctaattgaggaactgccaaactactttttgaaatggctgcattattttttattccctccagcagtgtattaaaatttcagtttctccacatcttcacaaacacttactgtgtgactttttaattgtagctattataatgtatgtgaaattgtatctccttgtggttttgatttgtattttcctattgaaggtagtgtcttttctcatgcttattggccatgtgtatatcttctttggggaaatatttgttgagatcttttgtcatttttttttcctgctagggatcattttattttaaaaacaatagacttttttttagcagttttagaaaaaatagagagaaaagtgcagagagtccacatatgctcccttacagtgcccctgcccagttctcccaactcttaacaccttgcgctactgtgctaaatcgattagatttgatgaactgatacttatatctgaaattcatagtttacttcagggttcactctgtgttttatagatttttggatttgacaaatgtataatgtcatgtacccaccattacagtattatgtagaacagtttcattgtcctaaaaatctcctgtgctccactgagtcattcctccccctcctcttcctcccaaacccccggtcattactaatctttttactctctaattttgcctctcccagaatgtcatataatagatcatgtagtatgtatccttttcagactggcttctttcacccagcagtatacatttagggttcttctgtgctttttcatggcttgatagctcattttttaaattgcagaataatattccatttgtttgcatgtattgcagtttgtttatccattcttgaattgtctatctctaattgggttgttttgtctttttattacagaattgtaattgttccttatgtacgccagacacaaatcccttgtgttcatcagggttgcaggatacaagatcaatatacaaaaatcaatagtatttgacacactttaactgagtactacatactcacaatgagcaatcagaaaatgaaattaagaaagcaacttcatttatcatagcatcaacaagaataaaatactgatatatttaagaagtgtaaaacttgtactctgaaaactatagaacatttttgaaagaaatgaaagaagatctaaataaatgtaaaagtatcccatgatcatggacctaaggcttaacattgttaagaaggcaatactccctaaactcatctacaaatttaacttcatccctgtcagaatcccggatgagttctctgtaaaatggacaagctgactctgaaattcatatggaattacaaaggactaggaatagccaaaataatcttttgaaaatgagaacaaagtaggagaactcatacttactgactttaaaacttactacaagtcagtggtaatcaggacaatataatactggcagaaggatagatgtatagaccagtgggatagaattgagagtcagatatgaacccatacatatataaccactgcttttgacaagggtgccaagattattcagtggggaaagaagtttgagaactctcacaaggacaactagatatgtaaacatatgcaaatcctggagtaggacctttacccaacaccacatacaaaaactatggatgcaaaaaaagtggatcaaatggatccattttgagctaatccacgtaaatgtaaggactaaaactataaaatcctgagaagcaaacataggagtaaattgtcatgaccttgaatttggcaaagttttcttaaatatgagaccagcaacaagaataaaaattgatgaattggacttcatcaaaattaaacatttttgcacttcaaaggacaccatcaagaaagtgaaaagacaactcacaagatggaagaaaatacttgtaaatcatgtgtagcactttttgatgataaacttgaggaagacttttttattttttatttttattatactttaagttctagggtacatgtgcacaatgtgcaggtttgttacatatgtatacatgtgccatgttggtgtgccgcacccactatctcatcatttacattaggtatatctcctaatgctatccctccccccaccccacgacaggccccggtgtgtgatgttccctatcctgtgtccgagtgttctcattgttcaatttccacctatgagcgagaacatgtggtgtttggttttctgtccttgcgatattttgctcagaatgatggtttccatatatatatatgtcagttgccaggactgctgggcaagcctgggaaagagagtacctggggaaagcagcctcctgctcccccgtgccttctttgagcctgatgttcatttgatgtggtaatatataatcacatccagtttaccctttgaaattccttgattgttcttttctatttccttgacactgtccttttacagaccacataatcttatctggaatactacaacagttttcttttctcagtgattttagaataacctgtcaaaaactcatctgactatagtagtacctgcttacaaccttttaattactccccattccctaccaggctgtgtagctcacttgagctctgctaggtggtgagggaatctgggtcctttttctggtatttgaattcagtgctacgtaggttactggctgggttgacaatctgaaattgtaaatcatgagtattctatgtagatagactgtcacgatttacaataaaacattgacatgtcaaagatcatggtgatgtgaggttgggtactgtctgtgagaattaattgaggaaattaaaattatatggttttatttacatagagtgtataacaactagttaagggatagatgtcttcttatctgactttcaagtatctaagagtggattattgtgcttgttaaagttctgggaaccatggctattttctgaaaatacctcagtgatgacaaatgaatgactaccagcctcttgtaacattaggactccagttcatccctttgcttcataggtgtgtcttttccttttgtatatatttgctttagtgtagaaaataggttttcttgattagaaatctaagaagaataaattgaaaactggagatttttctattgctttggattaccaaaattaatgtaatttggcactatatccctgtgccattattgtctctctggtaagtagatggtagggttttgggtgattaaatttttttccctattttgcttatttaatgggcatatgtttgtattaaaaaggggaaaataaataggaatgtagaagatgttaactaatcgtgaaagttattgggaagggttacctaatttaaaagttggccagccatggcagcactgcctgtagtcccagctgtgggggaggctgaggcaagaggatggcttgagttcaggggatagaggttacagtgagctatgattgtgccactgcatttcagcctgagggacagagccagaccctgtctcagaaaaacctagaacagcaacaaacagagagaggagcctggacggactgagcaatattagtgtccgggagctgctgtagtgatggcttatgacatcaggaatttattctctcacagttctggaggccacaagtccaaaatcaaggtgtgggcagaaatgcgctccctctgcagactcctggggaggatgcttgtttcttccagctctgcgactgtggtgcctgcagccattggaaccagctctgcacggctcagacctgggtgatgaggacacagctttgcaggtgggcagccacatccccagggggagactgtgggcctgtggcagggtaggggcaaccagtgcaggggctccccattgttgcccctgagctcctggggcttgtggagaaagacaggtggatgcacacatactgcagctccctggatctgagccttggtttccctacctgtgaaatgggcacccatggcagctcagaagtgtctgggagcatcccctgtgggggaaggtgtggggggctgctggggcacagtcatggggaaccccagtccccctctccatgtgcttccctcaatgctccctgatgccagcagtcctgcccccgaacagaaaggggcattcctgtgagttccttgtgtgggggactggtcacagagactccccaagtgcagggcagggtggagggaggctgaggggtggttgaatggacaggagaagagctctctccagtcccttgggtctgggtggcctggggagcatccatttgggcaggcagctggtggggctggtggctgagccactgtggctcggggaccccaggccaggacagagtagggtgggcagggagagcagagtgcgagcatatggggcaggacaggtgtctcctggacagaaagagccctggtcactcatggctgcagcatagccatggcgacaggaaagtgctgctgtacattgtgctcctggggctggctcccaatggacacccaacagcatctcccccattgtactgtgggatgctggcagtggtgctgggcactggggtaagagccttggcaagcccttcgctccctgggtgtgagactttgggctcctggatgcctgggtttctgtgtcctatttttcccatggaagatgtttggggtgctcccaggaaatggggagggccctggggggtcaggattgtattattaaagccagaaagtctggggttccatttttagcacaaggcaggcagcccatgagccccagcccagtggccagcctgtgtgggaggggagtgggggtctgaaggagtgaggcttctgttactgcaggctccacagcagccccccagggtggcccgtgtgggctggacagcggtcactgcaccaggggctctggcgccgaccttgagccatgcatctaatgcctgtgagagtgatctctaggagccactgcacaagggggcagatgagggaaccctgacatgggacagccgagggcgaccccaacacggagcgggcagctgtgtccaggctccactggattccgcagaggacagaacacagctctgactccagggtgtgggctcactgagggacaggacaggctggggttgggagagggccatgctgcagctgggccagatcccacctgcacccctcagatggcagggcctggacgtctccatccccaccctgacccggtcagtaacagccatgggccagcagcccccagcaacccctccctctgtgaactgccaaggacaggaggtaccacagtctcttccaggcaagagctgctggagccttctttattcttgtgctagaagcccagggtggggagaggagcctgagaacagcccagtgtgggcatccaccttcctgcccactttggaggtctgagtcacctccggccactctcccaatccccaggagcccagaggcttcctggagcaagccacacctgatctccaccatgggtaggagttcaaggccaggccaacagggactccacagaggggcctgtgggttagcagcagctgccagtgtccagatggcctcaggggtgggggttagacaatctggaggtcagcagggaattcagcatgaggagacagcccttagggttctggcccagcagccccaggtgctggctctgcactgagtcatgaagtttgtgggccaggggcgttggcctctctctagctgagagtgacttccatcactgctgtcattagcctcccctgcatcaacctgtccctggggtgggagcacagttggcacagggaccctcaggccttagttttccctgctgtaaaatgcatgtgataggctgtcatgaggtctgaaggagttaaaacctgccatgtgctcaggatgacacctagctcggtgcctcctaccctggtgccaccatccggcatcagagatgaaatacttctcccaggccccctcccctggcaccccccacactcagctctccatcagccaccccctccagggtgggacaaggaggtcctgagcctgatggggacctgacagggctgggcagcgccacctgggcctgggcgataatgggagcctgagtgtggggcctgcatggaaggagccattgtttcttgggcctcttagtggctacttccctagagtctgggagaagtgctgctgttcaagagaggacagtgccagcagctccttctgaggctggggtgggcacagcgtggaggggcctcacctccacccacctcccatggaggttcctggctctcctggaggactccttgctactgggctgaggcaccagggctgaccagtcccaggatggtgttggacaacctgcatccccctgcagcaggcagggagggcactgcagccaccacccacccacacctgacccctccctggccatcgtgtctagggtggcagggagtgaagcccccacccaacaacctcccccagctcaggggcctttgagttcaccaccatctgcctcactgcaggtttcccctgtgctgggggtgattgcagggagatggttctttggcgttccctgggcaggtcattgcctcagcccctgcctggtgtcctggagcagctttgaggagctacacggacaggacaccaactgtctgcagcccccaggtgaggcttggctgctgtgtcccactgcttctgctcctggctgtcaaagccccatggtaacagcatccagggtgaatttaaatggcaccccaaagaataagagtgggcctgggtgtcactgtagtggctggtggcttgtgacaagtagtgtggcttccgtagtgatgagaagtgacagttccccctgaatctgcactggagagaaggtcctggaagctttcaggcccaccctccagggtctgggtctgcatctctgagagtggctgggtgagcagaagaatcctgactgcctggcagtcgggtttggagctggggagggctgggcctggttagcaataagcctatcacagtgaaccagagctcaagataaagcgagaggcctagcccagacacctccttccctggtcccagcccctgtgccttggcctgtgcagtggaagccaggctccctcctccaggaagtcttccctgcacttcctgctcacacacagcctctcccagatttctccccatccaggctgagtaggattcccaagaaggctcctccctgagccaactgcctgcagtcaacattatcacctcccccagtgaatggcagtagtgtttttcatcttcagcagtggcctctggaggggtcctagcaggtcggggagagaggtctgagttagtcccacgtgaaaggcagcccatgcctctcctcccagcaacccctagcagcaacttccacctggctgaccccacccagctcacagagttgcccagctgggtgtccttgtggttgattggggggaaggggctgttacctcccggtccccttcaggctgagacaagagccctgtgggtctggatcttgcagatgggacccccacccacatgctctccaggtggatgcccaccctgggctgttctcaggcccctctccccacactgggcccacaccccggagggaactccatgtacccctgccgatctgcccatctgagcctcaggggtcctgggcactgagagctgggctgggctgagctcaggtacacactgtcattggggacggagaggggatgctgaagtgggtgcttctgcgtggggcctgcctggaggatcgccacagcaggtgcacccagcagccagaccagcttctagcagaataagcgcactgtcacaggggtatgtgagctgaggctgggggcctggaggtgcagggagaggagttggggagatgcagaggccccaaagatgtcccaagtccctaagactctggtgagggaatggaggagccagcactggtggggaagtgggcagggggaactggatggcctggctctgagctggacacacggtctgcacccacacttgagctgtgctgtgaaggcccagtccccacctgggcatgtcctgtcctctgaggcacagggattcctccccctcagctctgacccctcatctccaactgttgggatgacaagtccataggcagagccagcctcacaggggacccaaaggccagttcagatggacagcaactggaggtcccaccgggcacacacacacactgtgcagaaagctaacgcactgtttatttgggggattggggggaagcaccgtgccgctgctcactggtagccagccagctgcagaatggtggggtagcaagtacgatgggccatgcacttctggcggtcgatgaagagactgttggtcatggcagtgacgtccttctccaggctcatgtggatgtccttgaggttgcgcagggactgctccgcttgtagaagcttctcccgcagcgctgtgatggacttgtacagctcctccacctcactcaccagcttgggggtgttggggggtgtgagctggggctggggagggcagaagtatgcacctactggggtggaggggacccaaaactcccaatgggagctggcaggaggtcctgggaagacgccatgaaaggatcctaccaggaaagcggctctagggcagagcataaattacgagggtcctcccagggagcgcgggcctgagtgggaatgagtgacccgcgtgcaatctcgaccctgacaggacaggactggcctcagccgaccaggctcagttctttccattcctgatatttgacggaaggaggcacccagttccttgaaggaactgaggggcagggaaggaagaaaggtacttaggctcagaaggggccaccaggcatccgttaacaagggaaacaaaaggacggcccatctatgcctgtagcccaggcgtaggtcatactttccaccagaggtggggacagcaccctcagggcagcagggaatggccctctctggcctctctggccccgtggcctccaggagctcaccttgtctgaaggagcttcctcccgggaagatgaggtagcacagggtggggtgagaccacgtgggcacaggtccctggcacggggaggcccccgacccatgacctgcccagtgtcatgtctatatctgtgtgtttaaggcgtgcttgcatgttgtgtgtggccgcagagtctccctcccctctcagcacctgtgggggatgtgtgtgtggagattggagtgtttattggagagggtcgcagcgaggaggtggatgggggcacctgggactgcctcagaggcccaggcagtacctgaactgggctgcatcgcggcacagctgcatgttgggccggtgtgagagcaactacagccgggtctgggctatgtgcagaggttcctccttgtccttgatggcctccttcagtgccaccacgttgtgttcctgatctgtgatttcccgcagcatctgcagacaggacagtgccccttgggcctgtgcccccatgcccgggcatatggaatgtagagaccagtctggtcctacccagctcctggggctgtgtccagagggtggtcctgaccagtggccctggggaggcgtgggtgaggggaacaatgtgcacggggcccccagcgggctctggagagtcaggcagcctgttgtctcttagctctggtccaagaaccccccatccttggtggtcaccaggacccaaatcctgctcaaggactggggactcagaggtggtaaaggccatgctgaggccctagagtcagagccctgcctgccaggccaggactcttggggacctcccaggcagtcaatgctccccagaccagctcctgcctccatcctccccacagctcctccttctcagtcatgggggttgcaacacactgcgatcatacccagtgtcacctggttttacataggtttacggagaggtgacacttgcttctggggtccctcgggataagtgggacagaggagaaaggtgttgagggcccaggccaggtgatgagagggggcagagtggtgggcaggcgccggagccgtcttcggggttcagggtgccccaccttgtgcaggtggtgctgcagcttgtgccgcgcgtcctccagttcctcacagcggcgcccgaaggccaggttcacggcgtcacactggagtcccaggtcctcggaggtgtcgcgaaggatgcagtccaccagcacccacaggttggccgagtccaggcgctcgcgctgggcgtggcacagattgtcctgtgtgaacttggtccgggtctctggggtggaggcgctgcggggctggggacagccaggagagggtcagggaggctatgccagtggctgggggccctgccgcgcccccattccctgtctgcaccccatgctcctggaggaactgcatggactccaatgcaccccgtgcagactcacaaagcccagtcccccaagctccctgcctccgagtgccccccgcccacaactcccctgagtccacccacaccctacccaccccgggcacttagtcccctcctgcccccgcgaccccgttcccagcaccgctgcccccaaggccccctctgcagcacctccgtcccccgcagccccccttccctagtacccagcgcccgcgtccgcttctcgcacccaggagtttgccatgctcaagtgggcggtggtcgtgctccctctgctggccttgggtggaaatgcaatcctgccggcgcctggggctgaccgcatcccaccctgtcctgtctacgggcaaccaggctgtgcacgcgctgggcacttgaggaggtcttgcacgctttctcatgccaggggcagacagttgcccaagtgccctcgggggcgagggcctctgggccaggctgggggaagcagcgccgctggggcccccaggcagagggaggcgagaccacagccagggcaagcacggggacagagctggggtccccatctcttggaaggtggtggagtgccggatgagcctgcacctcggtgctctggctgtggtggcgcccgaaagtctcgtcgaggttgtaggcctccaccttgtccgaccagtccatctcgcagatctccgtgtgctctctgttcagtctggggcggggtggggcagggtcttggtgtgtggccagggagggccccactgggtaccctccatgctgcaggctaggccttcatgcccgcttcaggagggagctctgggccggctgtccttgtgctcagcagtgacgaagagctgccgcccatgctgggaggctgcagatcagttgtggcactgggctttggccactcaaactcaggctgggctggaacctcccccacccagccctgtgctcccactgtgacctgggacagcccctgccggctctgagcttcagggttctgtcgttcaatgccttgccccaggaccagccgtgggtggggtcaggagtcatcccttgggcagccctcgacccaagggtctggctcactgcttgcacgatggctctcttcagcagctccttaatgttccggatgggctcagcttcctgagggaggagacgccctgagcaccagatccggtccttggtgaggatcccaggaggcccagctgctgaaggccttggtcaacacctgagcaaccagaaatagttgaatgccgggcctgagctctgactgtgcaagttctgctctctcactgggtttatcctgggcttttgggcattctccttggtgcattgtaagtgggttgttttcctcaagggccttctatgggctgctgggaaggtcccttagtggcagttcccacgccccaggcctcaagagtcatcactgctgctcactcagtgcacccaggaacgttggcctgcccctggcctctggacagcccccgaggacccaaactctgggggcccagatgcccgcccaggctgcccctcagggctctgtgttgggaaagaccatcctcacaccaagaacaggaggaagaccctgtgtttcttcttactgcctggccagtttaattttctgtgtgtaggaacaagccttttttccctgtgattggggtctttgccgggaccaccagctacctccttgtgtgccagggcctgagtcctgcacccctctgtccctgggtttgcctcttcctgcactgtcagtgtctccatcacttcgcaggcacccttgttgcaggcagagggtttgcgggagctgcagcagttcttgaggcactgagaaggtgcagggggataggcctgcagaaggggaagggagggaggagggaaggcatgaagggagggagggactcaagggttcttgcctgagtttgggggtatggcaggagaccagctgcctccaccccacatctttcacaaatgtctacaggcctgtagtggttctcatggaggccccaggctctgagagctcagggaattctccagagccagcatcagggccaggactgagttactctctcaccctatggggttgccccatagacaagctgggctggattgggaagttacaggtgacaaggagaaggggacctgtgggtgcagatcttcgtgtccccggctctgtataggatgaatgggagcagtggctcccagcctatcccaccctacctgtccacacccacagtgctggcccagacctgggtttccacctcgggagcaactgtcccaatcagggagggtctctggggagcccagggtcaggatgactgtgccaggactcaaaggtattggaggaggagaggagaaacagctgcttggaagtcggggccttctggggcaaaactgcctcctgtcactaaggggccagatttcgggactcaggggtctcacgcatagagggctggtctcccgtgtgcttgcagcagccacgtggcttgtccacatgaactgccgggggctcctcctctctgtgcccacaagtcctggccacccaaggctgctggcaccttcagcagctccgtctccacatggtcacgcacaaggttggcgtgctggtggcactggctgcactgcatgttgtcagtggcaatggagaagggcacctccatggcatccagggcgcgctccagccgttgcttctgggccagcagcaggtcggtctccgcagccagcaccttcacctcgcgctgcagctccgacttccagctgtgcgtgtcctgcagtcgctcgcccaccctgcacgtggagtcttgctgtgtcggctgtgccagcgtctgggtctctgcggccagctgctggctctcgtgcccctgcagctcccgctctgactggttgcagtcggcgaaggcctggtggtagcgagcatagcagttctggaaccacacctccagctggcggtggccaggccggaggacgtgtagacgcccgtgttgcgggccacatcatactctttgcagggcagctcgcagggcgacactgtctgcggtgccggctctggtaggagcacatccgtctgcaccatggtgtctgccgcccaccagggccaggggagtgaggagtgtgtgtggtcagcttgttgcggtcagcccagtgcagtcatcggtcggctccaaaggctcagtcccagagcaggacgtggctcccagtcgcttgggtgacacagtaaaccaagagcttcctgttgccaagaaacgggatctcttctccagtggctaggggagggggcattcagggcggtgggcagaattgccctcttaaagggccaggcagccccagccccaccatccctgtccccacctcggggaaatcaacagtggccaagggttcctgtcacttagaggatcccagggccagcccgtctccagcctctgtgtcccacccttagggttcagggtgtgggtggggacctactgccctggccccttcgttgattcatccatttgttcctggtttgctctctgatcctgtcctgtgcggagctccatgctcagggtgaacaagacagaggaggctctgcccacctgccccctcagggcagagggctgtggttgttgtgtggatgttgggtgtgctgagtgatagtgttacttgatgccgtacaggtggctgctctccctgccctcctggccccaacagcagcctggtagcacagggagggtcccaggccaggccccctcaggggcagtctgaggcagttcctgcagggactccgctccattttctcctggacctagtgcctgagagccaggccctggcctctggccttctcctcccaagtcccagccagggtcccctcaggctgggcacagcggggagggagggagtctgagtgtgcttttccctggagagttgaattcagcctctggataagtgtccagagtcatatgcccaaatctgccccacagggcggaggcaggtcttgtgctgcggaggctgccctgaaagccacccagggccatgctgcctggcggaggctggatgggcagtaagcgccccaggacacatcagcatcccccaaacctggggccaggggagccccagcctaggcgcgattccccacgcagccagcgaagggcggctttggcctggcggtgagaagcctgcggctcctggctcggcctcccctccacctgcctggcgcatgcactcctggggaccccagcccctccggcctcctcttccctgagaatcccgcaccagaaagtcctcgctaggaagtccatgcccttcctacagcacaggcccctggtcccctgttccttccaccttcacctcctctcccaccacagcccgcaccctcactccagccacaggagccggggctcctcctgggccattcccaccacgccgcccaggtctctccagcacaaccatgtgccggccagtgccctcctcctggacctgacctcccccggtcctgacctctcccgtggccagaaccctcagtccatgctgctgtcaccacggtgcgcctggcctgacacagcctcctgatggggctttgaggacagcagccgggagacttaccccaacccaggccgagccagaacctattgcaggtggcctgggaacctcttctcactgtccgtcaagattgggaggtcagcggaccttcagggactggtgtggtctgagaaacatccttgagcctcgccatgactcagtttccccagatggcagcaggctggagcccatgcagggcaggatgccaggctccaccttttgtctggaacctgcattcactgggcacctctctgtaggcatagcagagcagagctccctgtttctgtccctgatctgcagccccaggagcccgagagaccacctaagccaaggagaaggcctctgggccagagcccagctctgcgaagtgggagacctctcagcctccacttccaggtgccctgaagtcgttggcagggggtgctgcctacttggggctcccagactaagggaacacattcacctggtgaccacaataggccctgcaggctgaggcacaggatttgaccaaggacgcatcagagttaggggactgggccctgactcctgccagctgcaaactcccaaagcccccagccctttcatggggtgaagacaccctgaaggacactccagtgtgctcccacctctgggttctgccagccagagagtgggactctcaggccacatgtgtcttgctggatctcagcttcagggacccagggtgctggcagctctctgagacctgggtcagggggtgtccattagagcaccttggtcaggacccagagatagggagggcagggctaagagcaccccaggcagttggcatctccagaaagcaggaggtagggcatggctctgtgacagatgtcccgtgacagggaggattggagggacagagggacgtgctcaggggctgaggggcagacgaggctaccaaagggcaccttggacactggatggccccaggaaggcccctgaaccccatcctgattgatccaggaccagtgtccttggcccagactgcaggcctggggactcaggttcctttagtttcttaagaaactactatactcctttttggcatagctgtacgattttacattcccaccagtcatgtgtgaaagctccagtttttactcatgctccccagcgtttgatgttttatttttattttagctattctgatatatatgtgttagtcattgtggtcttaatttgcaaatttctaatgactaatgatatttaacatcttttcctgttcataattaaataccatctgtattccttttcacatatcattagcacaaatgtgaaatatcagaacaaaatttttcacacaacttcaaaatttttagagcaatactcaagggaaaaggtgtttatttagaacaatgaaaacaatgagacattaacttccagcttaaataaagttgattgtgtgcataaaaatggtgaaaatattggactttcttggcaaaagaagaaaggagaagactttatattttctgacataatattcatcatttgtctttggtttgtgtattatgtgtatgattttgaaaaaatgcatcaaagatataactttctggtgtttgctttgatattatccttgcaaacagaaaagttggcacatgtttctgtataaaactggtcaaagttggcctaggaatgatcttacattgtactttcactttacatcatactgtaagagtttaataatagctaaggcatcagcattgatgtggacttattatacctattcaagaggtggtgtgaggtttaggagagttatgtgccctttatcataaaacaaatctatgaagcatttatataaaaacccagtatttctggtttcaaattcagtactgtgccgtctgcttgatagatttgttcacaggttagagacattttattgcataacttccatgaaatatcacagttgtactcttgactatgtttgaatcacaaaagactttaatctgcactcagttcttgtaactaaaatcttcagtttgaatatgaatttcacttaaagaacatccctagaaattacagagagaaaaagactttacttgcagaatacaatctgcatttgctttgacaactagttagttcacatatgtaaaataagtctacctgtctgtatgcataattaagatgtaacagtagtgtggtaatgacttgttaaagcaattcgaatggcagtggatcatggcacaatttaccttaaaagccatgagcagaatacatcacaagctatgatacaatgaatagtcattaggtttaaagtagtatccacatataaaaacacaaagcatattttagctctttaaatgaaagcttcattcagtcaatattggtcttcctgtagatgcatttatgaaacaaaaccacaaaacatacagcttacccgcttctcaaaactcattgcacaataggttgagggacttctctacaccaggacctattattaaaaccagtaagtcctcagtgaaaatcatttatatgcccggagtgtcatctgatgtgtctgttgtaggcagctgtggcagtggtgggtggtttagtgacacggaccctgcccacgtctgtccgtccatcagtgggctagtgtctctctggctgcacctgagaagggtctataggagttaacagcattagcatgggattcaaaagaaatcatcttggattcaaacttccatttcagtattcatttccagctaagtttgtgtagcatgcttaatgtttctgaagctcaattttagtaatggtaaagtatatctgcctaaaagacagggacacatcccagttttgtgtttttttatttgtattttattgtatttttcttgagacggagttttgctcttgctgcccaggctggagtacaatggtgcaatctcggcttaccacaacctccgcctcctgggttcaagggactctcctgcttcagcattctgagtaaatggaattacaggtgcccgccaccacgcccagctaattttttgtatttttaatagagacgggtttcaccatgttggccaggctggtcttgaacctctgacctcagatgatccacccacctcagatgataatcccgccaagtgctgggattacaggtgtgagccaccatgcccggccttatcctcaaaaaagaatttatcaaaattgtatatgtgtgtgtgtgtgtgtgtgtgtgtatgttttaagtagagtaatactatattaaaatgccactatatatgttctaacaaaaaacctcaatttaacaaatgtatgtggggagagggagagagggagagagagagaaggagggaggcagagagagagagaagagagagatatgtatctctggtgtctctttctttttggatgatgaccccagtcctaacagattagggccttacccttttgcccctatttaacctttaacttcttaaaagctccttttccaaatacagtcacactgggagatagggcttcaggttaggaattctggggggacataattctctccagaacagacactaataacatgagtgctcagattgctagtgaatatgttcttgttacaattattttcaccttgcagttttaaataatgaatacttggataaaaaatacccactgtattctaattttttcaacacttcttacttgcatggattctaaacagaagtccaatgtaattcttatgtctgtttctctgtagacaatgtgtttcttcctctgccttattttaatattttatctttgttacaggttttctacggtttgaatatgatattcctaggtatatttttaaaatattcatcctgcttggtgttctctgagctttttggatttgtaatttggtgtctgtcattaatttgtgtttttttcctagttaaaaaaatgaactttatagattttacattctcaactttcacttattttcaaaatgagagacaagacacctaaactccaagatttcagtcctgaatgcaatagtaccagattttcaagttacataagtgaactgcataaacatcactagtttcaagtgtaccctataagaaacacatggacatacttgcgttgtttaaccacacggtgtcatatcaataaacatcaaagtatctgacatatatttgtccattaaaagtaaacacaactctgagtatcaaattaaattaatcatttgccttttataatctaaatcagaaattgaaaaacaggaacattgtagaggtaagtggctaaaaatgctctgcttactgcacacaagcacatcatgacaaagaatgctagaagtagctttcctcagaagtaataattgaacatttaaaatattattttctcagaaaagttaaagcttttagtgtaaaaggcatgataaatgacattttaacttaatagttaactatatagctaattatagatttcaagcaattagttacccacatttcaccagaaccttcagtgaaagtgtctactctcaacattgaccagaaccttcctgttctgaagtgtctactctttagagttgcttcagctttacatatctgtaaaacctaagattactcaatgagaagttacaccttattctgtactagatacacataatatatatagatttagaacaaatggatgtttttcaacttcaaaaaaagtattttaatttacacaatgttagtttgtttttcacccatgtgtatacataacagtgtttcccaaattcacagggtccatttccataattctaaagcaaaaatagaggcacacaaatggataataattcatagttttatgccttttttttaacctatctttaaagaaattcagttgccatgtagacaaagatgtgatgaacctgtaacacatttctatgacttggaaaattaaaggtctaaaaatcctaaatgtagtagctctgggcagtttgcaatttgtgcatgggttcactcaccctatggtccgtgaactcccttatcctgcaagctgtaggtactttcagcaaatatgagactcaataagactaaggaagggcttgtttaaattagttcccctcacagttgattctaatcttgcaatgaacagatttaatgtactagtgagttaaattttaaagtaattataaagccatttactctatcataaatgaatgaaatgtaagaatcacacttaaaacaagtctttcattttaatgaatggtatctttcatttatatacgaggaattcacttgccagcagcatttaaatataggaatagtctcgtcttttctctagtgccttttataaagcagtgcgatttctaactaggtgtatttgtttcccagctattcagtaactacactataggtatctaatagattcaagaaaagattggaaaattgagaagatttagcattttaaacatttgaaaaatgttgctacaaagcatagattatgaatgcattagtaaaataaattgacaccttatgtgagaatcattaagttggtttaattatatcacagaagtatgggctcactaatatttataccaatttatgctaattaaaccagaaagtttctgtaggtaattcagctctgagcaccatttaatagggttatgccaaacagaaccaatggttatataatacccagaatataaacctcagcaaattcatacttttggaatggcaacacaagtgagaatgagaggcaatatttcatttcaaagtaccataggctgctaagagtgttcttttcttttaaaaatttgtgtggttgttagtaatgtaccttaacactggtcctccttgacagcggtgttagagatggttaggtagaacctatattacggaagtcagccttgcccatttctttagttcagtgattaaaattgaaattacttttacaaaacaattgaactgctgcttacaatataaatagaataccaacaggattcctgttgtattcacattattctctaattagtatttttacatttccactctgacctgaccttcagtagttcctttatttttattttcaagcatttttgtgagtatataataagcatatatatttatggggtgcatgagatgttttgatacaggcatgcagcatgaactaatcacatcatggagagtgggtatccatccctttaagcatgtttcctttgtgttacaatccaattagattcttttagttatttttaaatgtacaattattgactagagtccccctgttgtgctatcaaatagtatgtcttattcattccttctgcctatttttgtacccattacccgtgccctgtctccccccatcagccccctagtacttactatgtccatgagttcaattgttttgatttttagatcccacaaataagtgagaacatgcaatgtctgcctttccgtgcttggcttatttcccttaacataatgatatccagttccttccatgttgttgcaaatgactgaatctcattcttttttagggctgaataatactccactgtgtgtatctaccacattttctttaatacattaatctgttgatggacacttaggttgcttccaaatcttagctattgtcaacagtggtgcaaccaacatgggagtgcagataatttcttcgatatactcatttcttatttctggggtatatatccaacagtgggattgctggatcatgtggcacctctattttcagtgtttagaggaacctccaaactgttctccaccatggctgtaccagtagtaccttaaaatgcaaatgcaattggtaaaagaacaaggcagcgtgtagtgctttcacttacaaatactaccagttttgtaacaatttgcattttttttgtccttgaaagggtaaccacttacttaataaaacggatatttaaaagcacaatattccttcctttgcatggcatgcaggaatggtgaaagcaaagaaacagtcatcccttctcccccccacttctggtctcccaaaataggaatgccaggtcagacaggtggaggagggaaatggggcactggtcaaggtatgatgaatctcttaaaaagaaatccggccaggcgcagtggctcacgcctgtaatcccagcactttgggaggcagaggcgggcggatcactaggtcaggaatcaagaccatcctggagaacacggtgaaacaccgtctctactaaaaatacaaaaaaattagccgtgtgtggtggcggacgcctgtagtcccagctactgggaggctggggctggagaatggcataaacccgaggggcggagcttgcagtgagcggagatggcgccactgcattccagcctgggcgacagagtgagacaccttccccccactgccaaaaaaaaaaaaaaaatacagctttccccagaatgctagcctgataggaactccaccccatccattccaacctagtaaggatagtttagtttgtcttttctggtctcacttcattacatctagtgttctttttttgtttctgttattaaatttcagaagacaaaccctagcattttctaaaagaaattattttttacctaaatacattggactttggtcttaatttgaaggaataggataagtggactttaagagagcgttcctactccttctcttccagtggctgctctgggtccttgaaagagggtgtgatgtgaaccatctgggttgtgaagtggattttgttgagcctgtgttttttaagtccattagtcctgcccgacgctgtgcaccctggaatccttggcttcacgtctggaccaccttcagccaagtggtgatggtggagagggtccccccatcttccaggacgtgtgagagtttgtaggtggtgagatggagggggaagcttttaaatcttccagtacccacccccgctgctgggggtgctctccccatcgtccttgtccaggactcccatcagggtctcaatctcttctgtgatgctctgactcacatgctgggaggccctttccccaatgtagtccctgatgtcaacatcggcgtcctatgtccccactagcagcttcaccatctccaaggtaaatggctgccaagtgcagggcggtgtagctctggccttgctgttcccaggcagcagaggctcgttggggaagttgaccaacatggccagaagctccagcctgcagtgctaggtgcctgcgcaggcaggtgaggctgtgatgaagcccagagtggccagcaggctggctggcacgggggcaaccccctaagctgtccactccccatcggaggccgagagcagccagccgtgctccctggtccagctcacccagccccacagctctcctctgcggacgggaaagccagtgctgcgccgccagagtccctcgcctctgcggtgtcctcggaggaggagctcccaggctgctgcctccaggacacaggttcctcttcaagggcaggacactgcgccttcccaagtcgctcaagttctggaggaatggcctcggggtggtagccccccaggagccgcccctgtccgcctcctggcaaccgttgggcgggggctccaggtccttgctggtctgaggtcccgcatctggggtaggggctggtggagccagcgagctcttcctgcgtccccgccgctcagggcggcccgtgcaggggctgggctcccccttgcccagctcggccctgcctgtggagcacctcggggaccgctgtttcagggaggggatggtgaatgctgcgctccgcattcacatggacgcgggacaggtctcaggggcgcggcctcaggcggaggccccgccagaacctcttcctgagacgcaggtactgggcgccatcgacggggtccgtgcagtggccacagcgttcacccggagatacatttaaacagttttattctcctgttttttattttttcattccagaaaccattactactatgcaacaaagtaaaaatatctagtttaaataataatttgatacggtcaggtggggatgagtgcacacgtgtatgtacacacaaacgcaggctctaaatgggatattttggcggagcagagggataaggcttttatttcgttggtgtgttgagttagaatcgcccttctcacaattaaataatttaaatcaggagttttattaaagctaatttgtacaactaggcaatatcttttctccatatatttatacacatgtacacatctctaatatttgcatttattacttcatctaaaagagcttggaaaaagggtcctaggtcttggctagttaaggtaaaaatctatattttaaggtaataaaaacgtttgctatggacagagacatgcagactctgtggctgaagctgattcatgttccattgaaggaaatgacatggggttttctaagggaaagcccagcaagctgcaaggagaggggaggtcccaggagggaattggagtcagcattaggatctaagtgtcacaggggagtgtgttcccaaaaaagactgtgactgtttctgtgtccatcctgaactggttaccatgagtgtgtgtgtgtgtgtgtgtgtgtgtgtgtgtgtgtgtgtttgtgaattaaaagaggagttacatgctggggcatttctggtatctcaactggcatctcagttgctggtgatgatggctatacattttcctcagtattcaatgtgcgtattttgagttaacagtccacccattggctgaggcaggtggatcatctgaggtgaagagttcgagaccagcctggccaatatgtgaaactctgtctctactaaaaatacaaaaattagccaggcatggttgcagcacctgtaatcccagcttcttggattgcttgaatccaggagacagaatttgcagtgagctgagatgaaccactgcactccagcttgggcagcagagtgagacttggtctcaaaaaaaaaaagttattgtgacatgctgtacacattcacaaattcagtgtctcccagaagtctgagattctttttttctttctttcttttttttttttgagaaggaatttcactcttgttgctcaggctggagtgcaatggtgtgatctcggctaattacaacccttcctgggttcaagcgattcttctgcctcagcccaagtagctcctgcctcccaagtagctgggattacaggcatgtgacaccatgcgcagctaattttttatttttagtagagttggggtttctgcacgttgatcaggctggtcttgaactcctgacctcaggtgatccacccgccttggcctctcgaattgctgggattacagccatgagccaccatgcccagccagaaagttttaaggctatgattattagaccatcatacacacaaaaagtacttaaaaagtctcaggaatgcagtccctcattggcctggtatgacaaagataaaaagaagttggtcgtgaaaatttctgaacgtggtttaggacaaggagccccagtaagattcagagacaacctagaaaattgaaagacaattttactacccaaatcacccttctataaaaaataatagaagatgtcaaatatgaaaataaaactgtcctctgggccctcaattttctgtgttattgggaaggcagacagctactcagcagttatatcccataagaatggataacactaaaacagctgacatcatcaagtattggttagaaagtggaactgattctctcaaacattttcattgtagtttaagatggcacaaccacttaggaaaatgtctccctatttcatacaatgccaaatatatacttattttataacccagaaaatccactcttatgtacttaaactcaagaaaagtgaaaatattattacagaaaaatgtgtatatctgatttgttcgtagcaggtttattcatgataacctcaaatcagaaactgcttttgtgtctatcaatagtggagtggattataaacaaaacaagcaaaggcctcaaacctgtggtatagtcataaaattgagtattacaaaataaaattagtgaataatcaataggagcaaaatgatgtcacaagcatgtttagtgaatgaacataaaaattatataatttataatttcacttatgtaaatggtgaaaacagacaaaactatccttttgtggaaagaatcaaaaccatggaagtctctgtgttcaaatactgaatggaaatgggcatgagaaaacgtgtttctgccagatcttctatatgcctgatgtacattcactagatgtattttgcatatactatttttgcaaataaaactgagatagacacaaaataactcaagagaaaatagctagaaataagtagagttgggatagaagccttggaagctcccccctaccttgctcacctggcacaggccgaggaagcccttggacaatgctgtgagcgatctgagggccttccaggggagcccccccagcccatgctggtgcccgagctgcccgccgccatctgaatatgttgcaaagacagtgctggcctggcaaccggtgacactccatgccccaccccgacccccacttctacccaagtagcggcaaccccagagacagatgcctgggcggcagcggctaagtctggtagttggccaggcggccaaaggacgggaactggctgttcaccccatcccagtttccacggagaactcaaccatcatggcccctgagcggaccctcaggcctgggctgtgctctgtgcctgcaaacctgacgccatccaggggagctccgccttcccacgccagcgcctcagctgctgcagaaaactgcaaaactgcaagttgcacacaggcagagatgacggagcaacccctgaccctccgtgccactcaccctacccgcacacacacctgccacgcggaccctgaggccagtgcctgggcgcccaagtcaggcagtccgcacagcagtggcaccagggtgaaaacctgctgctcaataccatcccggttaccacgaagagccagccctggtggcccctgagttcttggaggaggccaagtcacagcaacccctcaagtgggcgggcgatgcacttgaccctgaggacatcaggtaccaggcccgccagctgacgccacatcggagccgcagctgcagtctagacgtggtgcaccggcagtaagtgactggacaccccaaaccaggcccgccccccagtagcgtggatcctgagaccagacccccaggcggcaaaatcaggcgatgggccccgccagcagctgctcagtttcatccatgtggatacagagtgcccagcgcccgggcccaggatccagagagatgcccaagaagagcggaagttgaggccaggtgggctgtgcgctctgcaaccctgaggccatccaagggaagctccgccgtcccacgccagtgccagatctgcagctgcaaactgtgcgtggggcactggcagcagttagggctggtgggggaaagagcagcccctgactctgcctccatgcctctacagctacctgacactagccacacagactccagggccagagcctcagcgtgaagccaggccatctgcgaagccacccaggtggcagcggagtgcccttgccagcaccctatctcccttccgaggaggagcggggtgggctgcaaggccagacaggccctccttctcaggccgggctggcggcgctcctgcgatcctggggccgcccgggcgatcccaagaggacctgcgagctcatcggcacccgcccagagctgcagccccacctgccggcacgcgccaccagggaagggcttccgggagccaggcagcaaccgcggtgcaggcgcgcgcccaacggctttgcgaggctcactcggtctgagaggtgggaggctacgagtgtcgctgctgaaggctgtggtggaccgggctggatcgcggactgtggagtagatcacagatttgggatcgcggattgggggttgatcgcggattgggggttggatcagggatttggggttggataggggatttggggctgggtcggccggggtcggcggaggaggtgggtgaaaaggtgacagggaggtcggccggggtcgggggaggggggtggtgaaaaggtgacagggagctgcccccgctcaagagccggaggttggggtttctgagaagtcaccactatgaagttattcggcttcgggagccgcaggagccaaacggccaacggctccatagaacatgtctacacgggttccggataccgaatctgggactccgaactgcagaagatccacagggcagctgtcaagggcgacgccgcgggggtggagcgctgcctggcgcgcaggagcggagacctggatgccctggacaagcagcacaggtagcggggactcagcccggggtgggagggggtccccaggcccggcttccccactgcccctgggacggggcctttcagggctctgggcaccctcagagcagcggagccaaacggactctcagctgttttccatccctcataattccatggctggagcagttggagaatttgagtgatttaactcacaaagttaagcatacacagtgttgttatttttaacgtacacgttgaaaacatggtttatatacattataggaggtgcctaatgagagaactcgttcccctatcaaaaataccgtgagttatttcagtaggcaaaaagttctcagataagagagcttacttgaaaaatatttactatattatatatatatatatatatatatatatatatatatatgtatgtatgtattttcagatgaaaagtatgttttcattttatagggaattcattatattcttttttttttttgagtcggagtctcgcttctttgcccaggctggtgtccaatggcacaatcttggctcactgcaacctctgcctgccgggttcaagcaattctcctacctcagcctctcaagtagcttggattataggcaggtgccagcgtgcctggctaatttttgtatatttagtagagagggggtttcaccacgttggccaggctggtctcgaactgctgacctcaagtgatctgcccgcctccgcctcccaaaatgctgggattacaggtgtgagccactgcgcccagcctatgttgtttattatatatcataagttatatatatatatatatatatatatatatatatatatatatatatatatctgatacgtatacatatataccagataaaatatgtcatatatatcagttatatatacacattagatgaaaagtacattttcatttgacagggaattctttcaaatcaaatcatcaaacactctaaaattgggcaaagtacacttttccagatctgcaagttacttgtgtacataggaaaaagtccttcgcatttctggtataagaatttaaattaaaagaggaatgaaacagttttctatccacaatatttgtgaggatgttttatactcctgcttaaagtttaagttgctgattacttttcaaatagataatttggtggtaagtactacaattaaaaaatatgtatgccctttacacatcaattccatttactaaaacacccttaggaaataaagatacatgcactttatttttcacctcacttattttaaaaagaacccaaagaatggatcctataaataaacttcagttgcatccacaggatggaataatatgtgaccattgaaggtggcaatagatacagaagtatattgatgtgcaaagatgtattttgttatagctagtgagaaaaaaatcaattaagttatacatacaaacaaactatggtcttgttttatcaaaaaatatgtacaaaatataaaatttgtaatttctgagcatttgtattttaagtaaagttcttttcctttttcttatctgtgattgctgcagtgagcatgtacaaaacttctagtaaagtttattaataaagaaataatccttgggaagacaggaatatgaatcttacaatattaaaaataatttctcactttctattttttatcattattgagtgtattgttatcttctttgaacttttagcctcttcagaagtaaaaagggaatatttttatctgtttccagattttattatctatatattttattatgtacatatgtttttcttatgtattcattcaatttatgcaaacaatgatagattaatcatttcattttaattgtattcttaaataaaaataacatataaatattactattgcaaaaatattgctttataggagtttatttaaaaatattgaactccccaactgtatttttccattctttcattccatttattcatcaaacataacctgagtatctgttatgtagcagacatattctgctgtctctcaggtcccttctatccttaaaaacttcatgtttacctgccctgcctgcacaagctgagagatttaaaataggaatattgggacttaatctccttgaaactttgtcacccaactttcaaacaaaagcatttctgaagttagaaaatagtagaagataagctttaactgcccactcaaaagtttatcagtcttaaatattaatattaatcatgggaatgtcttatttacatatattctgtaagcataaatattgaataaaatgaaccatatgtattcatttgaatcatgagtttcctttgtcttcaatttgtttgaaaatcaaggaattaatttgtttgaaaaatgcattattattatttcagtgttctatccccatagtacctttaagcaggcggacaagccagcaacctcacccgctcaaggaagcccagatggccaggttccaacagcatgagtagctgccacctgatggctgatggagcagagtcctgaggaaaagcagatggcactggggccctaactctagggcagaagaactgatgtactgtgactggcagcatgtgaggttggtgattggcccacctgttcctggcacacccttgaagaggtggctggttgctctttgagccagcttggccttgcctggcatgcacaagcctcggtgcaacaaccgtgctacaaatggagccatatataggaaaggagcaggaggctcaggagcagggtgtgcactgcctttggggctccagtgcatgcctcagggctcctatggcactgcaggcttctttgttgccaagaggcagaccacaggccgtcttgaggaagactttatgtacaagtgcagaaagcagccaggattaccacccaggggacttggtcttctgtggccctggcctgacagaatttggcccaaggcaggacaaggtcactcagagcagtgtgtcagtaggtggggcctgggcatgcgaggcaaggccaagctggctcaaagagcaagaagccacctctgcaagggtgtgcctggagcaggtggaccagccaccaacctcacccactgaaagaagccaggatggccaggtttccacagcctgagtggctgcctcctgatggctgatggagcagaggcctgaggaaaagcaggtggcacatttaactctttaatccatcttaagttaatttttgtataaagcagatggcaccagtccatgcctcagggctcatatggcactgtgggccacagaagggtgagtccccagggtggtaatcctgcctgctttctgcacttgaacataaagtcctcttcaagacggcctgtggtctgcctcttggccccacctttagggtagaagaactgatgtaccacgtctggcagtgagtgaggttggcggctggtcaatctgctcctggcacacccttgcagaggaggctgcttgctctttgagccagcttggccttgcctggcatgcacaagcctcactgcaacaagtgtgctacaaatggagccatatagaggaaatgatcagcagtctcaggaaaggggcgtgcactgcctttgtggctccagtccatgcctcagggctcgtatggcactgtaggtttcttggtcgccaacaggcagaccacaggctttcttgaggaggactttatgttcaagtgcagaaagcagccaagattagcacccaggggactgggccttctgtggccctggccagacttagaatttgacccaaggcaggacaagctgactcggagcagagtgtcagtacctggggcctatgcatgccaggcaaggccaagctggctcagagcaactagccacatctgcaaggctgcacctgtagcaggcagacaagccagcaacctcagctactcaaggaaggagggatggccaggttcccacagcctgagtggttgccgcctgatgactgatagagcagaggcctgaggaaaagcatatggcactggggccctacctctagggtagaagaactgatgtaagctgaccggcagcaagtgaggttggtagccggtccaccggttcctggcacaaccttgcagaggtggctggttgctttttgagccagcttggccttgcccggcatgcacaagtctgtgcaacaactgtgacacaaatggagccacacagagaaaatgagcagcaggctcaggagcagggtgtgtgcttcctcaggagccccagtccatgcctaagggttcatatggcactgtgggcttcttggttgcaaagaggtagaccacaggccatcttcaggaggtctttatgtggaagtgcagaaagcagccagtattaccacccgtgggactcggccttttgtggccctggcctgacagaatttggcccaaggcaggacaagctcactcggagcaacatgtcagaacctggggcctgtgcatgccaggcaaggccaagctggcttaaagagcacccagagcatccattctggtggataagccaaccacatggccagcttctgggtgtggacacagtgccacatcttccatcgctttctgacgtatcccaccaacactgaagagacagcctggagagagtgcaagaggaaggctgagaaggatcagatagtgagtgctggcttctttctgaccctcagcacaaccccaggtggtgaccatcaacctttaggggtgggagagcaagactgatggcttcaaacgcttccccaagaagatggacacaggccactcagctcatcctcacagccaatgagttgacaagcaagcagatgacagtgacaggcttttagaaagagcatcagaaggtggccagtttttcttcagcctcagccaggccttggaacttgactaggccatccacttcaccagagatgccttcaagaacatcagtaagctctttgccaatgagtccaggaaggaccttggacccagccatggacctgttagtgctgtctcagggacaccagaccaacatcctggacatcatcctcatacacaaggaagctcttaccaaagtcacggagaacaggcaacatgtggcagaagtgaagacagaggagcagaggctgatggtgtcattatcacaggaacaggatttctttggccactttggctgaaattcaccacttccatccaattcactcaagcgagagacttgaaatcacagatggaccatttcttgcaacaagagatactattttttcaaaaagtcacctaaaatttgatagtgttgaatgactagctattctattgtggactttttccagttcacgggtactttctacagcagaatgataacagtatcaaagagctagtgccagctatcggtggtagtacaaggatgactttgtgctcaactgaaacccagctgaatatagacttgtgtaggaaagtgttaatatggtgatagaatagaaacagtagcaaatgaactaaatcatactatgaatgcctacactaccattataactttttgaagaatgataatactacttactttattgccttttgaagtaggaatattttagtggatatgctatagacctgaaaccctataaagaatcccaaagaagctggctggataaagcctgctatggatgtctttatactcaaagactgatgaggcaattcgaatatgtgtccccaccaaatctcatgttgagttatgcttcctaatgttggaggtggatcctggtataagatgactgaatcatgaaggcaaatttctcatgagtggttcagcaccatccccttggtactgtcctcacaatcatgagtgaattctcgtgagatctggccactgaaaactctatatcactccctactctccgtgatttcctcttgccatatgagacaattcactctttcatttaccttgcacaatgattgaaagatttctgaggccccccagaagcagaagcactaagcttcttgtccactctgcagaaccatgagccaattaaacctctttttcaaaataaatcttaccaaaaatggcaaatgaggactgcagcattgctataaagatacctgaaaatgtggaagcaacttcggaactgggtaatgggtagaggttggaagagtttggagggctccaaagaagacagacagatgagaacatttttggaccatcttagagactggttaaatggctgtgacaaggatgctgacaaaaacatggacagtgaaggccaggctgagggggcctcagataaaaataagaagctttctggaaaatgtctctcttttggatatggaaaacttacacaatgcctgtaccatcattgtaccttagacgcagtgaacttgctttttatttcagagactcgtaggcaaaagagaatgtagccttgacccagatgagactttggactttgtaactttgagttaatgctgaaatgagttaagactttgggagactgctggcaaggcatgactgtattttgcaatgtgagaaggacatgagatttgtggggtcagggacagaataatacggtttttctctatgccccttccaaaactcctgtgaaagtacactccctaatgttagagtcggggcctaggtggaaaaagctttaatcataaaggggtgggagtggatccttcacaaatggcaaagcaccaagcccttaatgccatcctcctgatagtgagtgagttctcatgacatctagtagtttaaaaggctgtggaacctctttcctctctctgtcttgttccaacttttgccatatgaaacatgtcattgccacttggatttctggcgtggttaggaggggcctgatcagtgtgggcctggtcagtagacctaggtcagtgaggactatttagtgggatcatggtcagcaggggtctgcttagagacggtctcattagtggggtctagtagtgggggttttggtgagtggggacctattggctgccagtcgtttggtgtctggtcagtgcaaacctgggctgtggggcttgatcagtggagacctggtcagctggggcttagtgctggtctggtcagcatgggctggggcactggtgaccaggtcaaggggtgctactcagtgcaggactgggcacatgagacttagtcagcagaccctggtgggcgtgtcctcatcagtgaggcccttgtcagtggggtcctggtcagggccgccttgccagtgggacctaatctgtagtgtcctaatcagagaggacttggtcagtggtgacttttgtagcactggtctacagggtgacctggtcagcggggatctcagcatttggtgccagttcagtggggtctactcactagggtcccagtcaggggcatctggtgaccttaggcctggttattaggggcctgatcagtggcaacctgttccctggaggcctggtcagtggggcctcatctttggggccagggaatgaggtcatgatcagtggaacctgatcagtgaggccttgtcaataatgacctagtcagtgaggacttgtcagtaaggacttggtccgtgaggccttgtcagtaaggtcctggtcggtggagtccttgtcattgtgtgcccggcagtgggggccttgttagtggggcctggtcatgagggtctaatcagtgagggtgtcgtcagggaggacctgatgtgtggggtctggtcagcagggacctggtcaatgtgggctgctgagcactgcttggataagccaggtgcaatgtgcattattgaaggccctgtggacagctgggatagcccagtgatgcccaagggcctagtcaaaagtggacaaagcacgtgtttggatggacctgggagatcctgctcagagattctgacaggacaaaggtaaaggaagggctagagtggctgcagagatggtcacagtctatgggctgcacaggatgaaggaggccagggaacaggcagggtgggcagttggggttcagggagaggcaggtgcatgctgggaggtcagaccctgtgagggctttgggggcgtcaggttgggtaggctccaggcactctcactcacataggattccagaacactgctacaaggctctgagtgtttgtccctcacataggattccagaacactgatgccattgtctgaatgtttgtcccccacataggattccagaagcctgctgctggggtctgaatgtttgtcccccatctaggattccagaacactgctgcgagggtctgaatgtctgtccctcacatatgattctagaacattgatgctagggtctgtatgtttgcccttaacatatgatttcaaaacactgctcctgaattctgaatgtttgtccttcacataggaatacagaacactgctgctggagtctggaagtttgtcactcacatagaattccagaacactgctgtgaggatctgaatgtttgaccctcacatgggattccagaacactgctgcgagggtctaaatgtctgtccctcacataggtttcccgaacaatgttatgaggttctgaatgtttgtccctaacataggatttcagagcactcctgctgtgctctgaatgtttctccttcacataggattccagaacactgctacgagggtctgaatgcttatccctcatataggattccagaacactcctgctgtgttctgaatgtttgtccctcacataggattccagaacattcatgctggggtctcaatgtttcccttaacataggatttcagaacactcttggggtctgaatgtttgtcactcacataggattacagaacactgctgctggagtctgaatgtttgtcagtcacatagaattccagaacactgctacaagggtgtgaatatttctccctcacctagtattccagaacactgttgcaagggtctgaatgttggcccgtcatataggattccagaacactgctgctgtggtctgaatgtttgtccctcacatagaattccggaacactgctacaagggtctgaatgtttgtccttcacataccattccagaacactgctgccgtggtctgaatgtatgtccctcacataggattccagaacactgccacgtgggtctgaatgtttgccctcacataggattccagaacactactgctggggtctgaatgtttgaccctcacataggattccagaacactcctgctgtggtctgaatgaccctcacataggattccagaacactcctgctgtggtctgaatatttgtccctcacataggactccagaacactgctaagatggtctgaatgtccctcacattgtattccagaacactccttctgtggtctgaatgtttgttcctcacataggattcgagaacactcctgctgtggtctgaatgtttgtcccttacctaggattcgagaacattcacactgggatgtaaatgcttgcccttaacataggatttcagaacactgctcctggggtctgaaagtttgtccctcacataggattccagaactctcctgctgtggtctgaaagtttgtaccgcacataggattccagaacactgctgctgtggtcggaatgtttttctgtcacataggattccagaacactgcagctgggttctgaatgtttgtccctcacataggatttcagaacactgctacgagggtctgattgttggtccctcacataggattcctaaacactgctgctgggctctgaatgtttgtccctcacattggattgcagaacactactgctatggtctgaacgtttgtccgtcacataggattccagaacgctcctgctgtggtctgaatgtttgtctgtcacataggattccagaacactgcggctggggtctgaatgtccctgacataggattccagaacattgctatgaaagtctgaatggttgtctttcacatagcattccagaacactgctacgagggtctgaatgttggtccctcacacaggattccagatccctcctgctggggtctgaatgtttgtccctcacaaaggattccagaacactgctatgagggtctgaatatttgtccctcacataggattccagaacactcctgctgtggtctgaatggttgtccctcacataagattccggaacacttctgctgtggtacgaatgtttgtgtctcacgtaggattccagaacactgctacgagggtctcaatgtttgcccctcacataagattccagaacactgctgctggggtctgaatgcttgtccctcacatacgattacagaacactgttgctggggtgtgaatgtttgtccctcacatgggattccagaccactgctgctggggtctcaatgtctgtccctcaaaaaaggattccagaacactgttacaagggtctgaatttttgttcctcacttaagactgcagaacactgcttcgagggtctaaatgtctgtccttcacataggattccagaacactgctacgagggtctgaatgtttgtccttcacataacatttcagaactgccatggtctgaatggttgtccctcacatagtattccagaacactgctatgagggtctgaatgtttgtacctcacataggattccagaacactgctatgagtgtctgaaagtttgtccctcacataggattccagaagactgctgctggggtctgaatgtctgtccctcacatcggattccagaacactgctgctggggtttgaatgtctgtccctcacatagaatcccagaagactgctgggagggtctgaatgtttgtccctcacataggattccagaacactgctacaaggttctgaatgtttgtccctcacataggattccagaacactgctacgagggtctgaatgtttgtcctttacataggattccagaacactccttctggggtctgaatgtttgtccctcacataggattccagagcactcctgctgtggtctcaatgttttttaatcacataggattccagaacacttctacaagggtctgaatgtttgtccctcacataggattccagaatattcctgctatggtcttaatgcttgtccctcacataggattccagaacattcatgttggggtctgaatgtttgcccttatcataggatttcagaacagtgctcctggggtctgaatgtttgttcttcatataggatttaagaacactcctgctttggtctgaaagtttgtccctcacataggattccagaactctcctgctgtggtctgaaagtttgtccttcacgtaggattccagaacactgctgctgtggtttgaatgtttgtccctcacataagattccagaacactgctacgagggtctgaatgtttgtccctcacataggattcctgagcattgttgccgtggtctgaatgtttgtacctcacataggattccagaacagtgctacgagggtctgaatgtttctccctcacataggattcctgagcattgttgccgtggtctgaatgtttgtacctcacataggattccagaacagtgctacgagggtctgaatgtttctccctcacataggattccagaacacttctgctggtgtctgaatgtttgtacctcacataggattccagaacactgctgctggggtctgaacgtctgtccctcagataggattctagaacactgctgttggggtttgaatgtctgtccctcacatagaattccagaacactgctgcgagtgtctgaatgtttgtcccgcagatgggattctagaacactgctgtgagggtctaaatgtctgtccctgacataacattccagcacactgctacaaggttttgaaatgtttgtccctcacataggattacagagcactcctgctgtggtctgaatgtttgtccctcacataggattccagaacactcctgctgtggtctgaatgtttgcccctcacataggattccagaacattcctgctgtggtctgattgttcctcaaataggattccagaacactgctacgaggttctgaatttttgcccctcacataggattgcagaacactgctacaagggtttgaaagttttcccctcacataggattccacaacactcctgctgtgatctgaatgtttgtccctcacataggattctcgagcactccttctgtggtctgaatgttttttcctcacataggattcctgaagactgctgctgtcactatagtcgttgcgagtgtctgaatgcttgaccttcaccaaacactaaatatcctgcccctttagtcttggactttccagcctccagatctgtgagcaataatctctgttgtttatgaattactcagtctaaagtattttgttatagtagcctaaagagactaagagagcatcacctgccctgtcacctcatcaccgcattactaaagctatactaacagcagtcacctttagtgggtgcttcatgcatgagaataaagggaaaaaattgcaaggcatactaaaatccaaaaaaagaaaaaaatacaatttgtgtcaacagagcaagcttcagaagcagacaaagatatgattttggaattttttttaaacctctggagaatatgctaagggcctaatgaatgaagtagacagcattcaagtgtagatgggtaatgtaatcagaaagacagacatcgcaagaaacttcaacataatgtagtggtaaaaaatgtggtaaataactgaagaatacctctgatggcttattagtagactggactcagctgagtaaagaatctctgagcttgaggatttatcatcagaaactttgaaaactaaagaaaagaaacactgaaaagaacagaagatgatatccaagactgtgggacaactacaaaaggtgaaacagagtaatgagaataccaggaggagaagaaatagaagaaagttctgcaacaaccatgtctgagaacttccagtattaatgtcagacaccaaaccaaagatccaggaagctcagagaacaccaggcagaataaatgccaacaacctacacttggacatataattttcaaactatatgaaataaaagataaaggaaaactctgaaagaaaccagaggtgatcccagcactttgggaggccgaggcgggtggatcatgaggtcaggagatcgagaccatcctggctaacaaggtgaaaccccgtctctactaaaaatacaaaaaattagccgggcgcggtggcgggcgcctgtagtcccagctactcgggaggctgaggcaggagaatggcgtgaacccaggaagtggagcttgcagtgagccgagattgcgccactgcagtccgcagtccggcctgggcgacagagcgagactccgtctcaaaaaaaaaaaaaaaaaaaaaaaaaaagaaaccagaggtggggcagaaaacaccttacctacggagacacaaagataagaactgcattcaacaatgcagaaactgtgaaagcaagaagacagtgaaatgaaaaattcaaaatgttgacagaaaaaacccaccaacctaagtttctgtacccactgaaaacacccttcaaaagtgaaggagaattaaggccttcctcagaaaaataaaaattcaagaaacttattgccaggagacctgtcttgcaagaaatgttaaatgaaattctttagagggaaacaaaagatatataactgaaacctggatcaacattttttaaaaaagagcattaaagaattgtggtacaataaaaacctatgtatttattcttaattgatctgaccaagaagttcatagacaataacaaatacacacagatagattatgtatgcttatacacaagttaaatgagtaacactaatacaaggaatggaatggaaggatgggagggaggaattgtggtacaataaaaacatgtatttattcataattgatctgaccaataagtttgtagataataataaatacacacagatagattatgtatgcttatacacaagtgaaataaggaacaataatacaaggaatggaatggaaggatgggagagaggaatcaggtgttttctttgttaagcaggtagtcacccgtgaagtgggatagtgttatctgaaagtggacttgaattggttgtaaatgtatattgaggaattaggtgtgttctttgttaagcaggtagtcttatttgtgggatagtgggatagcgttatttgaaagtggacttcaatttgttgtaaatgttactgaggaattaggtgttttgtttgttaagcaggtagtcttatttgtgggatagtgggatagtgttatttgaaagtggacttgaattggttgtaaatgtatattgcaaattctgtggcaactagttaaaaaaaaagttttaaaaagagaagtacatgctaagaaagacagggaaaatgtagtcatctaaaatcatcaatgaaaactgcaaaaggcagaaaaagagtggtagacaaaagaatggagactgaggagaatgaatagaaaacagtaacaaatatagtagatattaatccaatgatatcaataatcactttgaatgttaatggtatgaatgtaccaattcaaagataaagattgtcagagtctatcaaaagacagacacatcttgtttcactgcactttgctttattgtgttttgtgaccatgtgttttacatattgaaggtttgtggccaccctgcaataagcaggtctcactggcaccattgttcctacagcacgtgctcacttcacgtctccgtgtcacatttcggtcattctcacagtattttaagctttttattattgaatcggttatagtgatctgtaatcagtgatctttaatgctactgttgtcattgttttgggaaccacaaatcacaccaggataagacagcaaacaattgacaaatgcatttgttctgactgccccaccaatgggccatttctctttctctctctttttctcaggcttctttttattaatattaaaatgtggccaattaataaccctaaaatagcctctatatgttcaagtgaaagaagagttgcatgtctgtcactttaaaccaaaaggaagaaataattaagcttagtgatgaaggcatgctgtaagcaagacaggccagtagctagacctcatgcaacaaacacttagccaagttgtgaatgcaaaggaagtgttctggaaagaaatttaaagtactactctagtgaatacatgaatgataaaaagctaaacaatcttgctgctcttatgaagaaagtttaattggtctagatagaagataaaaaaaaacaaaaaaaattccattaagcctaagcctaactctctttttactttttttctttgtttttgagacagagtttcattcttcttgcccaagctggagtacaatggcgtgatcttggctcatcacaacctctgcctcccaagttcaagccattctcctgcctcagcatcccgagtagctgggattacaggcatgcaccaccacgcctggctaattttttgtatttttagtagagacggggtttctccacgttggtcagactggtgtcgaactcccgacctcaggtgatctgcccgcctctgcctcccaaagtgctaggattacaggtgtgacagccaccgcacccggtctcccttcaattctatgaagacttagagaggtgaggcagctgcagaagaaaagtctgaagctagaagagcttgtttcttgaggtttaaggaaaaaagtcatctccataacataaaagcgcaagataaagcagcaagtactgatggaaaaactgcagaaagctatctagaagataattgattaagatggctacactaaacagatttgcaatggagacaaaacagacttctactagaaggagatgccatccaggatgttcccagctagagaggagttgatgcctggctttaaggcttcaaaggacatgctgactcttttgttaaggcctaatgcaattggtgatgttaacttgaaaccaatgatgatttactattctgaaaatccaagggccctgaagaattatgataaaacacagctctgcctgtactctacaaatgggaacaaagcctggatgacagactatcggtttacaaatacggtttactgaatatcttaagcccactgtcgacaactactgctcaagaaataagattcctttcaaagtattaccgctcaatgacaatgccgctggtactcaagggcttttacagagatgtataaagacctgaatattgttttcatgcctactaacccaacattcattctggtgcccttggatcaaagaataatttcaactttcaagtcttatcacttaaaaatatattcataaagctatagcttctttagaaagtgattcctttgatggatctgggcaaaataattgaaaacctactggaaaggattcaccattctagatgtcattgagaacattcatgatttaaaaaagatcaaaatagcaacattaggagaagttggggccgggcttggtggctcacgcctgtaatcccagcactttgggaggccaaggcacgtggatcacgaggtcaggaatttgagaccagcctggccaacatagtgaaatcctgtctgtgctaaaaacacaaaaaaaattagctgggcctggtcgggggtgactgtaatcccaaacacttgggaggctgaggcaggagaattgcttgaacaggggaagtggaggttgcagtgagctgagatcgcatcactgcactccagcccaggcaagacttcatctcaaaaaaaaaaaaaaaaagagagagaagttgggaagattattccaaacctcacagatgacacaggggttcacgacttctgtggaggaagtaactgcagatatggtggaaataacaagagcactagaatcagagaaagagcctgaagatctggcgagactgcagcagcctctggagaaaaagtgagaggatgagttgctcccacggatgagcaaagagagtggtttcttgagatgaaatctactcgtggtgaagacagtgtaaacaatgttgagatgacaacagatttacaataaacttggtacagcagaaggaaggcttgacaggattgaacccaatgatttacaataatacataaacttagttggtacagccgtacgaaggtttgacagcattgcatccaattttgaaagttctactgtgggtaaaaagctatcatcgtatgctacagttaattcttttgtgaaagggagagtcaattgacacagcaaacttcaacgttgtcttattttaagaaattgccacagccaccccaacgctcagcaaccaccaccttacattaacataagaccctccatcagcaagaagactgaaacttggccaggtgcagtggctcacacctgtcatcccaacaccttgggaggccaaggtgggtggattgcttgagcccaggacgtcaaggcaacgtggcaaaaccccatctctacaacaaaaaaaaaaatacaaaaattagctggacatggtggcatgtacctgtagtcccagctagtcaggagtctgaggtgggggtttgattgagcatgaggttgaggctgcaattactccagcctgagccacagagtaaaaccctgtcacacacacaaaaaaagattgcagctttctgaaggctcagatgactgttagcacttgttaacaataaagtatttgtaaattaaagtgtgcatactttgtagacatatgctattgcacactttatacagcacagtataaacatacttttacatgcactgggaaacaaaaagaaattgtataacactttattgcagtggtctggaaccaaacccacatatatctctgatgcacggccgtcctgtattgtacacttaaaaaaatacttaagagggtatattttaggtgaaatggtcatctcattttttttttgagacggagtcacactctgttgcccaggctggagtgcagtggcacgatctcggctcactgcaagctctgcctcccgagttcacaccattatcctgcctcagtctcccgagtagctgggactacaggtgtccgccatcacacctggctaattttctgtatttttagtagaaacggggtttcactgtgttagccaggatggtcttgatctcctgacctcgtgatccacctgccttggcctcccaaattgctaggattacaggcgtgagccaccactcccggtctcattttttaaaaagggtgagaatgagaaatatatggggggtgatggtcaagtttacggtattatttgttgtgatgagtcctggggcgaatatttatctctatactcattaagatgtatatattcggtgtcacatgcctgtaatcccagcactttgggaggccgaggcaggtggatgatctgaggtcaggcgttcgagaccagcctggccaacatggtgaaaccctgtctctactaaaaaaatacaaaaattagccgggcgtgggggtgcacgcctgtgatcccagctactcaggaggctgaggcaggagaattgcttgaacctgggatgcagaggttgcagttagctgagatcatgtcactgcactccagactgggcaacaagagtaaaacctccataacacacacacacacacacacacacacacacacacaaggtatatattaaatatgtgtaatttttgtatgtcaaccacaccttagttttattttgttttatttttttgggacagagtctcactctgtcacccaggctggagtccagtggtgcaatcttggctcactgcaagctccacctcccaggttcacaccattctcctgcctcaacctccggagtagctggaactacaggcacccgccaccacgcccggctaattttttgtatttttagtagagatggcgtttcacagtgttagcccggatggtctcgatctcctgacgtgatctgcctgcctcagcttcccaaagtgctgcgattacaggtgtgagccaccgcgcccagacaatttttattttttttgagacagagcctcactctgtcacccaggctgaagtgcagtggcactatcttggctcactgcaacctctgcctcctatgttcaagcaattctcctgcctcagtctcccgagtagctgggactacagatgcatgctatcacgcctggctaattttttgatttttaatagagatgaggtttcaccatgttggccaggctggtctcaaactcctgacctcatgtgatctgcccacctcagcctcccaaagtgctgggattacaggtgtaagccactgcacctggcaatttttaaatatatataattaaaatttaataaaaaacaggtatttgcaagtttccgttttgttatatgcttattattctttatatttatgtcaggttgctgtgtcaatacacttaggagatcatagtttctaaattgaaatacaaataaatatgtctgaaatttttacttttttctttttttttgagacagactctcattctgtcacccaggctggagtgcagtggtgcaatctcagctcactgcaacctccgcctcccagattcaagtgattctcctgcctcagcctccagagtagctgggattacaggcacccgccatgacacccagctaacttttatatatatattttttctatttttagtaaagacagggtttcaccatgttggccagggtggtctccaactcctgacctcagatgatcctcccgcctcggcctcctcaagtgctgggattacaggtgtgagccactgtgcctggcctggaatttttttctaaaatttacatttctgagttaagaatgcttaaaatgttataaaaacagaagcacaattcattatgtgtttcattaattacctttattaaaaacaacacaattatattacaataggacaaaaaatgtttaagcaaatgaaaacgaaaccatgacatacccaaactcaggaggaggcaacaaaggcagtgctaaagggaagcttacagctccagatgcttaaattaaaaagaagatctcaaacccatgctaaagggaagcttacagctacagatccttaaattaaaaagaagaaagatctcaaacccatgctaaagggaagcttacagctgcagatgcttaaattaaaaagaagaaagatctgaaacccttgctaaagggaagcttatagctgcaggtgcttaaattaaaaagaagaaagatctcaaatcaataacctaacattacacctgaaggggggaaaaaaaaactaatgacaaaccaagcaaaaggaagaaaataacagattagagcagagataagcagaataagaccagaaaaaaggaaaaaaacagagtttgtttttttaaagatcaataaaaattttaaaactcacagctatattaagaaaaaagagaaatctcaaatactaaaatcataaataaaagaggtgacagtacaacagattccacagaaatgaaaaagattacaagagactaatgtgagcaaccatatgccacaaaactgggcaacctagaataaatttataaattcctagaaacacaaaccaccatactgcatcatggagaaataaaaaatccaaagagacctgtaactagtaagaagattcaaccagtaatcaaaaaccccaccaaaaagaaaattccaggtccagataacttcactggaaaattttaccaaatatttcaagaagaattaatgccaatcctctgcaaaatattccaaaaatgttcaaaaaccagaaggggacattccaatccatttatcaggtcaacgtttatctggttccagagccagatgaacaccttttgtaataaaaacactcaaagaattagtaatatatggaaactcctcggtaaataaagattatacatgaaaagctcacagctaacatcatactcaatggtgaaagactaaaatcttttcctctaggatcaggaataagatagcaacatctcttcctgccacttctattcatcacagtactggaatttctactcagaataattagtcaagagaaagtaataaaaaggatgcaaattggaaaggaaaaagtacaaaattttgttcacagacaacaggatgtaatgggtaaaaatcctgaaattcccaaaatactggtaaaataatgaaattcaacaaagtttcaggatacagtaacacacacaagtcagttgcatttccataaactaacaatgaacaatctgcaaataaaattttaaaaagagaggccaggtgcagtggctcacacttataatcccagcactttgggaggccaaggcgggtagaccacctgaggtcaggagttcgtgaccagctgggccaaacccatctctaaaataaatagtaaaactctgtctctattaaaaatacaaaaattcgctgggcgtagtggcagacaactgtagtcccagctacttgggaggctgaggcaggagaattgcttgaacttggaaggtggaagttgcagtcagctgagattgtgccactgcgctccagcttaggaaactgagtgagacgccatctcaaagaaaagaaagaaaggaaagaaagagagagaaagaaaagaaaagaaagataaaacaacagaaaagaaatttttaaaaagaatgacatttggctgggtgcagtggctcatgcctgcaatcccagcagtttaggaggccgaggcaggcagatcacctgaggtcacaagttcaagacttgcctggtcaacatggagaaaccctgtctctactaaaaataccaaaaaattaactgggcgtgctggcgcgcacctgtgatcccaggtacttgagaggctgaggttggagaatcgcttgaataaagaaggcgccggttgcagtgagctgagatagtgccactgcactccagcctgggagacagagcaagactccatctcaaaaaaaaaaaaaaaaagtattacatttacaacagcattataaaaattaaaaataagcttaaccaaaagggcaaaagatttgaacacagaaaactacaaaacactgttgaaagaaattaaacacaaataaatgaaaagaaaagctgggtttgcagattagatgatttcatcttggaatgatgtcaacactactcgaagtgacctagattcaatacaatccttataaagattccaatgacatttttgataaacagaaaatcctatcctaaaattcatatggaatctccagggcccatgaataggcaaatcaatcttgaagcagaacaaaattaaaggtctcaaaacaattacaaaactgcaataagccaaaaaaaaatgtggtcatggcgtaaagacatacttgacacacttatggaccaacacaacagagacctcagaaaccaaccctggcatatatggtctgatgatcttccacaaggatgccaagaccactcaatggcgaaggacagtttcttcaacaaatggtgttgggaaaattgtatatctacatgcaaaacaatgaagttggactcttaccttacaccacgttaaaattaattcaaagtgaattataaacctaaatgtaaaactagaactatcaaactcctagggaaaacaaatttggaaaatgctttatgatgatgaatttgtcaataatttttaggatatgacattaaaagctcaggcagtaaaagcaaaaatatatcaaacctaaaaacttctgtaccacaaaggtcacaaccaacagggtaaaaggcaaactgtagaataaaagaaaataccagttgagtgtcccttatttgaaatgcttgggatgtgtttcagattttgtaatatttgcattattcttactggttgagcatctcgaattcaaacacctgagtctgcgatgctccaataagcatttcctttgagtgtcatgttggcactcaaaaagtttcagactttggagcatttgggatttcagatgtttggatcagagacattcaacctatagttgcacatcatgtatctcataagaagtgaacattcagaatacgtaaagtactcctacggagagactaccagaagcagagaggagcagacacattttcacactagggcacctcctatctctcccggattccaattagggcagagtaagtgctagttctctgccaacccaggattaggccctacagctgcagtgaaaataatcacagaagaaaactaagaaataaaaaaatggagaaagtgagacatcaaactaaaattactagaaaccccaaggaagaaggaaaaagaaacgaagaaaacagaaaaacaattaaaccagttaattaaaccttggcatgaccagaagatcagagtttcctaaaggagtggaaatttattgatttgaagaggatttattgattactgatttgaagaggaagaaaaatcatgaatggtctaaagcaaaagcctagtgtctgaagaagtcagtagggtgaaaacaagagttggccagaatgtccacagatggtgacaagttggcaaagcctttactagactactcgtgaggctaactagagtccaaggagccgacactgcccctgtccttacagagagaccctacacaggattcccagatatacatggaaggacaacatcttatcaggtcctctctgtgcagatgtggttatcattccaaataatgagctccagccccaagactgttccatcctcaattgctttgagtgggcaatgtaggctctccacacacgacctacatgtaggttccttgggtacccagatgggagccatgaaacacaaaccctccatggtcaggtctgtatttgtttcctgcctttttcccagcaatccccaggccccagcagcggtagtctacctctgctgattctcattcagaatctaaacttagaaacaattagaacctagaccccaattctacctgaaagtaacagaataacataatctataccctgcagcatgactgtttgcccaacgtaatgaggatgaactgagagataatgaatgatcatgaccctggcccaagtaatgagaatgaactgtgagataaatgaatgatcatgacaaaaaaccccgctacaacccaacaacaaaataaagtgattaaaaaatggacaaacaacatttatccaaagatgcaaagatgatatacaaatagccaacagatacatgagatatatgagaagatgtgtaacatcactagtcattagagaaatgcaaaaagaaaccacaatgggacatcacttcaaacccaatagaaagtaacaagcgcaggtgaaactgaaacccttgaacactgttggtggaaatatgaactggctcctcaaaaaaaaataaaataaaatgaccatatgatccagccatccaactactacagagacagaataactagtagcaggacctcaaacagatatgtgcacacctaagttcacagcagcattacacagccacaaggtggaagaaacaaaaacgtccgtccaggaataggtggataaacaaaagcatatatatatatgatatatattatatatatatataatatataatatatataatatatataatgtatgtatataatatatatgtaatatatatataatatatatatgaagaaatattattcagccataaaaaggaagaaaatcgtgacacatctgacacataacatggaacctacttacaaaacaacaaatattatataaccctaggtatataagccaaatttttagaaacacaaagtagaatagtacttgccaggaggtggaaggagggggaaattaatagttgttgaatgggtatagagatttccaagataaaaaaaaaatctagaaatctgctacacaacaccgtaaatattcttaactctacaaaactgtatacttacaactagttacgacggtaaattttaaggtatgtgtttgttaccaaaattctaaataataaattatttataaaaaatgatcttttttgacacaaggtcttactctgttgccctggcaggagtgcaatggcatgatcacagctcattgcagcctcaacctcccaggctcaagcaacactcccacctcagcctcccaaatagttgggactacaggtgcacaccaagatgtcaggctaaattttggtttggtttttttgtagagagggttttgccatgatgcccaggctggtctcaacctcctgggctcaagcaatccacctcccttggcctcccacagagctgagattatgagcataagccaccatgcccagcctataaaaaaatatttcaaaaagccaaaatattaatcaaactggaatatttagaaatatttaacccaaaagaagttaggaaagaatatatagaagatcaaaacacagacgaaggccagacatggttgctcatgcctgtaatccgaacactttgggaggccaaggtgggtagattgcttgagctcaggagttcaagaccagcctgtgcaacatggcaaaaccctatctctacaaaaaatataaaaattagccaggtgtgtttccatgcgcctgtagtcccagctactcagtgggctccagtgaggattggttgggcctgggaagcagaggttgaagtaagccaacattgcaccattgcactacagtctgggtgacagagcaagaccctgtcttaaaaaaaaaacaaacaaatagaaaataagtagaaaaatggcagacctaaatccaaccttagcaatgattagttacaatgtaactggacaaatactctacttaagacagagactgccagacctgagaggaaagcaagacccaacaatatggcatccacagagacacaatttaaatacaaagacacaaagtatgagaaaaaatatgctatgcagacactaatcataaaaatatgctatccagacactaatcataaaaagcttcaatggagatgttaacactagatgaaagaggctccagaaaaaaatatatcaccagaaataaacaaggtaatttcataaaaataaaagaatcagagaggatgatgttacaattataaattgtgcctcaaagtgcaaacaaagtacacacacacacagagcctcaaattatgtgaatcaaaaacaacagaacaaaagcaggaaattgacaatccaaaattataactggtgaattaatactgctctctcagtaactgatggaacaaccagataaaaatataggaaaaatacggatctaaatgacaaaatcctgacccaaatggtacttggcagtaccaagatagactgtcgatcaattgagaaaatgttcaagcatgaaatagtatacaaagtatgttgtctgaacacctgaaattaaattagaaaccaacaacaaattgatatccagaaaagcctcaaatgtctgaaaaccaagtaataaactttgaaataccctgtaagtcaaaaaagtattcacaaggggaactggaatgtatttggaacaaacttgttataaaaatcatatttctggtagactaaaggtgacaacttctttcctgctcctctctctgtgagaaccaattccccttaaaccttgcccagactactgacttgcttggccaacagaaggtgacaaaggtggtatttggggacttcagaagccaggctgagaaaacagaacacttatccaggagaaagccagtcaccaggcaggaaatcccactcccctgagaccccatgatggaaaccacacggccagtccatgactagctacatgcattgacatcccccattgaccctctagcaacaccgactcccaaccactagtgagccttcagcaacatccactcccaaccactagtgagccaccctgcacaccaccccgctgtgctttcacacaatccagcttggctgcaactgtgtgtgagatgagctggtcaccaagactctctaagccaaaaaacaagtaataatgagttgttttaagctgccaagttttggggatggtttcttcagaatagataactggaacagaatattgtagctggaaatgagccgctgtggtaatcagaagctacaatatgtgccacgactgtgaggctgacctgtaactgggcctcaaggagaccattcatgcaacctggaagggcatcaagactcttggtcagggcctgaaagacggtgagaaaatgtcattggaaactggggaaaaggcctgagagttatgtgctgagggactgtgagaaaactatggccacaacatggaaactgaaagggcactgcaccatctcagggatctgcctaaggagacatctgggaagaacatggaaagtgctatcagcctcccctaactgtcactgaataaacatgacaggagagggacatgatctaaagaaggaagttcagttttccaacaaaatttagagaaaatataaagaaataatttcttgtctcaaaaggccaaagaaaaaaaaaaagaaaagaaaaaaaaattataaagaagccattgaataccctattgaccataagaaaaaggcagagaaagttggtcaacggcaacccaggcactgaaggaaaaagaacatggagaatgacaaaagcccagagggaggagtaaaaggacacaaacgccgttctcagggacaaggactgggcgccgttctcagggacctggactgggcactaatcacagaactgtaacaggcgccccatgggaatgaccaactgttagacggggcctgcagggcagcacctccctcctgcctcccaccaacagcttctaaagggaaatgccgactgttttcacaccagtcccctcactgcggctgagtgtgtgggcacagatgataggtcacaacaacctgattcagtcctcactgtggctgagtgcgtcaggggcagacgacaggccaccacaacctgattcagtcctcactgtggctgtgtgtgggggggcagatgacaggccaccacaacttgattcagtactcactgcggctgagtgtgtgtgggtgcaggtgacaggccaccacaacctgattcaggattcagttgggctaccagccagtgccataaggaaaaccattctgggactcttgagaggggcaaagcataatttgcatgtgggagaaacgttagtagtttgtggccagaggacaaactgtggtttattaaagactgctgcaggttcctactatgcttctcatcaagaggtggaatctaatcaccttccccccttgaatcatggctggtctcagtgatgagtacgactggacagtgtggcaggagagatgctctgggacttctgagggatgatcatgagagaccttacagcttctgcctgggcctcttggacacatacactgggagaagccagacaaacctgactacctgacactgccagactgggaggaagtccgtgctggccacaaagagagggcttggtgcctgctccatgtccccagccactagagtccttctggtgtctgcttcacgtccccagccactagagtccttccagatgagaccagggacatcatgaagcagccaacccacattgccctgtccagtgtcttgacccagaaaattgtgacatgtgaaaagaataaattcctggtttaagccagtaaggttactggtacattgttacattgcagataattaaaaccttgaaaaactcatgagagatcccaagtaaaaccttgatctgaaacatggcatgtggcgatttatattgagtattaggttaaaaatgcaagattggagaatagttaatattttacgtgaaagctaaaactataattgcccacttaaaattttcagttaattaggttgtcactttttgtttttaaccaagaaatcaactagttttagtccataaacagttggaactgatgcacacatccgtttttccttactcattttaagcagctatctgaaataggaagtgtaatataatctttaaagaatctgaaaatatgacagaaatgtttaaactataaacatatattgtaaatgttagcatattatatacattgcatattaacataagctaaaatcattgatataaacttatataaacaaaaggtagaaaatatgacaatgttcttcttgttttttgtctttgcatatttctttattggcccttgtcaaacgtgacccactaagtcctgaatgctttctctctccccatggattcctaaggatgtcaccacagtgctggccagatgcacagatcacaggtgactgaacctcatcaccccatgaacacacccttcaggttttgccaagaatgacactgtaaatatgacaaagcttctgtgcttgttagtgaacaccaattcagcttctctcctgtatttggaaatcaggatgagatgaaaacaagcaggccaggcacggtggctcacgcctgtaatcccagcactttgggaggccgaggcgggcggatcacctgaggtcgggagttcgagacaccctgatcaaaacagagaaaccccatctctactaaaaatacaaaattagccgggcgtggtggcacatgcctgtaataccagctactcaggagctgaggcaggagaattgcttgaacccaggaggtggagggtgcagtgagctgagatcacaccactgcgctctagcctgggcaacaagagcgaaactctgtctcaaaaaaaaaaaaataaaaataaaagaacaaggaaacaaaagcaacaaggcttgacaccagatgagcctgaatctaagcaagaaaagcccagaagaaatcccattttgggtcactggctgcatggtagtaatgccatacacataaggaagagaagaggatgtggctttcacttcgaattttttgagcttaaggtaaatttggatagctacaaagaagcattcaacagagagttaaacctatgatggaaagactgaagaggtccaagctgtagagaaacaggactgcaaaccacaaagggctgaatcagtcaaggagaactgcagggcaagatgaacagggaccaatggaacatttggataagctgttgagaagaaaggagaattcagagaaaaagaactgtcagtgaggtcataataggaactgttacagtgaactaaatatggcctgggaaggactctgtacttctagatttgagtccctgtggacaaactgcaacctaacttaataggtagaaagactgaaaacgtaacttaggagtatgtgcctaaaacagtagctgagtcctggccaatcccaacagccaaacttctgccactcacacactgctgagtgttcagctgtgttcaaataaggcaaatgctgagcactgtaaccagtccagttgtttctggacctcactgctgagaactgtaatggacccagttgcttctagacctcactcctcacttcagatttttgtacatcatgttccctttattgtctataaatcttccaccatgtgtctgtgctggagtctcactgaatctgctgtgattctgggggctgcctgattcgtgaatcattcattgctcaattaagctcctttaaatttaattcagctgaagattttcttttaatagatggtgtcagaagtgggatccgtgggagcaggactgctagggcctctggagctatactgtggtgagcagtgttgctaagacttctaatgacccccagagtgctgaggtacaaggaaggaacctgaaaggacccatttgtgatggcagcagtggcccacgtggagcagttgctatggagacactggctgcagtggggaggagtggctggggctgtgcactcctcaaagctggtgggagccaggaatgggtgggagacctgccccttctaaattatcaggcaggagccccaccctcccaggcacagctgcagccatccagccatgactgcaaacccgggcatctctgcactctcagaggcccagcaagcccccctgccccgcaggctcagttgtacctggtcctgccacctggcgtctctctgcttccagagcccactccaaattcagatccaagttgaggccaaacctgggcacagtcacaacctggcctggtttgcgcaagctcagggcagtgctgacatgccagccccctgccacctcggccccctccagaatttgggcactggcaagcacaggagggaggctgaggtggggctaagagtggctcagcagtggccggaaggccctcctcagctcgaacgcctgggcactatgggcacagctacccaccgtgcgtctcctctcagctgctgagagctgaacagacgttgggatgacctgcctgcagaaaggagctacccactgcaggtctcctctgagccgtactgtggctcaataaagcacctcttcaccttgctcaccttctacttgtccacatacctcatttttcctggactcaggacaagaactcgggacctgccaactagcagggctgaaagaggtgtaacataaacagggctgaaacgcgctcctttcttgccaaattgcaggcaagaagaagagaagagagaaggagagaagagctgtgtcccttcagggaacacacacctaggagctcctccaaccagggctgtgacaccttctttggggctctgcaggtcctgcatctccaagcttctgggtgccactgcattccctgatacccacagtggaagctgtttgcagtcggcctggtccagctgcagcctcacagggagctggcacctgtgcctggagctgcccaccccactgcagctggcatgcttggctgtgtgcagtggcagatcccatgctcgcttgctcacacacccctcactgctctgtacccagctcgcccttggcaggtgtgggatccagaccactagcatgagctgagtggacagaactaacccagtgggcccgagcaaaacacaggtaaaggtgccaccagccagaggtttcaggcagaaaagtgacacctcaggattctgtaacacttgtgtcctttgatctctctgagcagctggggatcatggtaaattttctctcggatttcagagctccatggatttgtgttttgagctctgagtttctttgagcaaatttctgttccaaactgctatccagccatgactggctggatgttttagaagttatgacagaaaacggaccgggtccaggatcagatttgatccagtagttaattggcttgaatccagttccagttagaggcctcctacatctgactgggtcagaaggaaagtggtagtaaatgataatattggaagattgtaacatttggcttttgaaaattcacagggatttttgtgttctacccctttgtttcatttttctcgcacggttaggcaggaaaaaaaaatcattggctaagttaatgaagggaacctgggagtaaagccaatattttaggtaaaaataggatccttaatttctggaaaactaagctccttctggctaatacattaggcctgggaagcagcaaagtcttacagaaatggcaaaatcttattaagataacttacagtggaacattccaaatgaataatgccctgaagtgcatttaaaaatgagggttcccaaattagtctcatctagggatgcctattaatatgcagaagcttctaaaaagatttagagatggcaccgcccatctgggagcaagtttgagtcttaccagtttgatactgggtgctgagcaaagtggcacgtgtctatgttttgtcacatgtattttgctctgggcagaatgaaaaatgttaatttggttactccaagcaaccccttgggcagcatcttgcaaagctgagaggattcttcctgtgattccatgattttccattgtgatgcagcttggcccccagagctataatgtggtgaggagggtgacagagcaagacgcaatctttaaaaaaaaaaatggccaggtagagtggctcatgcctgtaatcccaacacttggggaggctgaggcaggtggatcacctgaggtcaggagttcagggccagcctgaccaacaaggaaaaaccccatctctactaaaaacacaaaattagctgggcatggtggcacatgcctctaatcccagctactcaggaggctggggaaggagaatcgcttgaacccgggaggcagggggttgcagtgaaccgagatcacaccattgcactccagcctgggcaacaagagggaaaatccatctgaaaaaaaaaaaaaaagaaagaataataggtttgtctatgaggttttatgaaaaagtgggtgacatttggctttctcactttaaagaagatgttcaggtaatattaaaaaataatgaaaaatttgtttgccttttaaataaactaccaaaaaaaaaaaaaaaggaaaaacaagaggcagatcgtttgtgaagatgtcttccctctatcaatgagtaaagatttttgccctttaaaacttttttaagtcatgattttaagtaaatgaatgacttacggtgacctggaattctatttcataacatcaagtgtttaaacttttaatatatttaataggcttcccaaaatcaaatttcaacttcaaaattgtcttttctgacctctaactttgggatactacagaggcccttgaagcacccaaaagagaggtaaacaggactatttaacatgttaagtcacatgggtagcactgtcaaaataaaacataatgttgaacctttttcaggttatatttagtttatgtcatcaacccgttctaaaattgtataggatttctaaaattcttttttttttttcccctgagacggagtcttgctctgtcacccaggctggagtacagtggcacaatctcggctcactgcaacctccgcctcctgggttcatgccattctcctgcttcagcctcccgagtagctgggactacaggcatccaccaccatgccaagctaatttttgtatttttagtagagatggggtttcaccgtgttagccaggatgttctcatctcctgacctcgtgatccttccaccttggcctcccaaagtgctgggattacaggcgtgagccactgcacctggccaggattctaaaattctaatatgcctatatgctatctatcataattacctgttttgtttgttttgagacggagtttcgctcttgtcacctaggctggagtgcaatggtgtgatctaggatcactgaagcctccacctcctgggttcaaacatttctcctgcctcagcctcccaagtagctgggattacagacaactgccaccacatccggctaattttttttatttttagtaaagacagagttttaccatgttggccaggctggtctcaaactcctgacctcaggtgatccacctaacttggcctctcaaagagctgggattacaggaatgagccaccacatccaccctaattatggttattaagttattgtagaccacagaaataaccaaatttccttatcaattgtctttaactataactatttaaagtcatttccacagttaattgcttaatgatgatgcagtttctaaaaacttcacaagcatgcaaaattctagaatagaagattcatgaaagaatgaaaaggaccatgaaaaacactcgggaacacaggtttctaataactttaatatcatgggtaaaaattccccataagttccccgatcccccaataattggactggtgaagaattctcaaaagttaggctgggtgcagtggctcatgttggcaatcccagcactttgggaggctgaggccggtggatcacttgaggtcaggagtttgagaccagcctggccaatggtgaaaccccacctctactaaaactacaaaaattagccgggtgtggtggtatgcatctgtaatcccagctactcgggaggctgaggcaggagaatcacttgaacccaggaggcggaggttgcagtgagccaagattgtgccactgcgctccaacctaggtaacagagtgagactctgtctcaaaaaaaaaaaaatccaaaagtttaataagaagaccaactggtttataaaactgctaacccaagtaaaacaaaaactgaatatcaaggaaatattttccagatttgcatgctaaatcaccaatattgaaattgtttagatatataatttaaataaactccatggtctaagccaaattacctataactcatcagttaccagtgccatgcacctaatttgaagaaacagctggtattcaagaggatgtaagtctaatgttaattaagcacggacttatgaataaccaggatggccacctttccgtcttaagtccttaaaacttttgttattaaaagttctgcattccataactcatcatggaaagagaaaatgatccaaattaaatatattgctgtggtgatctctaaattgctaaaatagtttataatcaatgtttggtatgtcgaacctatattcctaggaaaacaatcaaaacttcaggtgcatttggttacctgatgggccatttaaacattttataaagggatttcattcagttgtcattttcagtgcatgttttctgattgtaaaaaagctcttccatgcaagagggttgatgttaaaacagtagattattatgctgaagtgtattttcaccagataaagaaagccttttatggttcacagaggacagccaaccccttcacaatctagaatctgatgactggatcttctgagaacatcagaggactgcccttgccattcacatgacagcaaaactttaaaaccttaaactttgggttcatagtcttacaactcagaagggtccctccacacttggaaccatacaccccttggaacccttaaggtaaagctaacaaggacagttcccccccagaagaagatggcatccttaatgtgaacagcttttcccaagatcacagatcaagacttctctactatcatgagactcttatcttaagtatctgtgcagctgctaacatggcatatggagaaaacatcgggtattataaagatttggttgtagggaattaacaaaaagacccacttagttaagcaagtaaactctttatctaattcattctttaatctatttgattttaggtggtttgatttatggggaccctgagtaaggagcatataccaaattcttggtgttatcccaatagtcataagagtctccctggtgcactgtacttactcaaatgttttaagagtttgcatgcagccatctctaaaatgtcaaatggtatctcttcaactggaatgacaacagattaaaaaaatgtgcaatcataaggacaccgtaacctatgagtgacatgctaaaccagaaacccaaaacaatgggagtgacatgctaaaccagaaacccaaaacaatgggactgatgtactaaaaccggaacccaaaacaatgggagtgatgtactaaaaccagaacccaaaacaatgggagtgacgtgctaaaccagaaacccaaaacaatgggagtaacatgctaaaaccagaacccaaaacaatgggagtgacgtgctaaaaccattacccaaaacaatgggagtgatgtgctaaaccggaaacccaaaacaatggtaactaagagtggggctaaggccctacattttggtcacactctcaactaagtgagaacttgactgaaaaggaggatttttttttttctgagacagagtcttgctctgtcccccagagtggagtgcagtggcatgatctcggctcactgcaagctctgcctcccgggttcaggccattctcctgcctcagcctcctgagtagctgggactacaggcacccgccagcatgcttggctatttttttgtgtatttagtagagatggggtttcaccgtattagcaaggatggtctcaatctcctgatctcgtgatctgcccacctcggccttccaaagtgctgggattacaggcatgagccaccgtgcccagccaaaaggaggaattttttaagcaaaattatgggaggccattgttttgaactaagctcatgcaataggtcccaacagaacaaaccaaaccaaaatggagtcactcatgctaaatggaacataatcaaactaagactttaaggaaacacataaatcctagaacaaaccaggttttgtttttctcctgtaaacaggatgttccagcataagaagacaacttctactcaagtccttgttccaccttttcaaatctcactgttctatttcccagtgggtttctaaaccaaataagtacatttgcaagggtaatagtgacaccagtgactgaagttttggccaatctctcaaaattgagaaaataaccaaagggaaggcattgttaaagtgaactaagtatgtcctgagaaggactccataattatatatatgagtccttgtgggtgacctgcaacctatcttaataggtaaacaagaatgaaaacctaacttgagtgtatgcacctcaaacaacagctacatcttggccaatcccaatggccaaacttcaaccactcaggcactgccaaatgttcaaactgtgctcaaacaaggcaaacgctgagttgtttctgtacctcacttccgatttcggtatgccacttcccttttgtctacaaatcttcttccaccacatgactgtgctggagtctctgtgaatctgctgtgattctggggactttccgattcatgaatcgtttattgctcaattaaactcctttaaagtttttcttttaacagaactaacacggaagaatttccagatcatgaacagatgttttgtaatacccaacgttgtattaacatgaatagactcttccttagatagctaaccttgtttttaatatgaatagactctcccttagctgagaaaaccagacaaactccatttggctccttcatttacaagacatcaagggctccttacccaccccctttcctcaaggactttaacttgtgcaagctgattttcaacatatcaaagagtgcaattaactgataaagtgctgaggcaagtgatgtccgcagttcccagcaaattactcagagataatatcataaagcccccacatttgtctggaagataatgcccagagccccctcactcatcactttgtggtgaatttaaagcctctgcacctggaacagtttgttttcctgtaaccatctgtctttttaagttttttgtctgttttttcttctgtaagtttattgcagctggaatcccccctcccctctctaaaccaatgtataaaagaaaatctagcccattctttagggccgagagtatttcctgtgttagccatctctcagtcaccagctaataaaggactcctgaattcgtctcaaagtgtggcatttctaactcgtttgggtacaacagtttcaactatggtagaagactcgagtaagacaaatacagcccccctaaatttgactattatttaggttaatggtgagtttagaagaaataagttaagactacacagagtgggctaaattgcaaataaacactgaaaatatttcccagaaaatatgactttgaacaggctgctgcacaccctgcatgtagagataaactaagaaaaatgtgtggagagttatttaaggacctgtggttaactcagtcctcaagatgttctgggtttcatccatgagtcaaggaggacctcccaaaagctgtttgggaccacactctttgagcaaggagcataccttatgatggaagctgtgctttagcagcagatgaccatttccactgcacaacacgccgtgctttagcagacgatgaccatttccactgtacaacatgctgtgctttagcgtcagatgaccatttccactgcacaacacgccatgctttagcggaaaatgaccatttccactgcacaacacgccatgccttagcggaagatgactgtttccactgcacaacactacaagtgcttactgccagaccggtgtgaaatatgttccagcacataatctatgtcaccaatgaaggtggtggttaagacttggtgcacacaagctttcctgtcccacaagaacacagcatgctctcttttcgggttccattccaatcacgtaagaaacatgactgccttttttgtttcggcatcagaaagatcagaggaaactttgcactcaacttagacaactctaagcttttataacctgtctatatctacaggtcagctttatcttatttatgtatatttccttcaacctgagttttacttatttccacttttcctttttaattcacagacacccataaactcagaaaatacagtgtaaaacaaagtgaagaacaaataaacaactcaccagagatttattcgtttcttgttgctcttggaaacacccagaggacactggaaacatagctggaagagaaggcaaatgacgtcgattaaggagagaactggtgaggtgtggtcccagattcttctgcccaacactctagacacattacctggaaaagccctcctccctccggaaaaagaaaaacttccccatgggagaagagtccttcacacctcattaggggcagcagagactcaagttaagataagatacatctacaagtacattaattggtagacattagatgcacaatttatttttgaataaaaatatgtattacctactaatttagtaacaatattacctaaagatataatctaataatttaatacaaagaaacattataagttcactaaaataaatgttatagaaatatactgggctgtattaactattttcctattaacatgtggattccacagataacttcatatgagtattcccatgacagtacatcttgcttttctatacctgaacatcatggaaagtgcatcttgcaacccagtaattttggcctacgttttttaaaatgtacataatatgtatttcctgcagtacaccattctactcatgtttcccaataacacctttccctgtatccaagccctcatattatgctctgacaataaattgggcttttccatctgacttgtccagtgaatggacaatggaaaatgtgatgcaaatatccattggttcttgcctttttggacacagtcatattgtgaagaggtctggagctaccctgttggagacacagggcctagccaagagtcaccacaaaccaccagattgtgaaggaaactatcttaaaccaaccaggctcagtcaaggcaccaggtgactaaggcctgttttgtgatccaggcaacacaaatatatcaactacccagctgaacccaccacaccaaaatgcagatccacagaacttcaaacaaataaaatggtggttgttttttataagctagtaaggtttaattagttccttaaacagcaaatattaactgttacacctaagtgaatagaattcaatatgtttttaacgaaattatgtagggggagaaagtcttaaattacaaatcaaatgcaatcaatagaacttcacaatctatgctaaatttggtgatggactaggtttaatatatctcagacactggaaacaacaagctaagtttgaaggaatgggactgtatttggagagtatttcaatcttttcaagtatgacaggtcactcctgcaccccagaccacactttcaggccccttcaaataaggaatatttcctaggtccttgcctgttcttctcagctgaattcacctcaaccttctgaaagttcttccaaaccttccactatcacctagtctttgaaaatcttgtgcattctagggagtagaattaatatttcctgagcgaggaaaactgggatcttcacctgcgaccttttatcctcctctgaagcaccagtgagaagttagaccagagggctgttctttcaagtgcgcttcttattcatagggaaccctccctttcaaactttataacacacagtgaagactgaagtacccttaaggctgaagaccatcatccagtaccccatctccctcgcggaatcagtgagttcctccatggaaactaggtctcgtataaacttccataaatgcaatccaggaggactaggcaggtcacacagtgaaggagggaaccagaaacttcacttgttaaatagacaccaggaaacccaactaatacaaacgcccagcttgagactagaggcacacgcatttcgcactactactctgggaatggggaacgtctcccgagaactgtgtgttagcacggggacagatgggcaaactgagctacatgagggttggtaaccgggtccctcagtggcaggacaggagcgcggcctgcagactccgggcccagggccaccagcctcgcctacccactcctgcgcctctggaacccgcttcactgctgggaccccacgtctgtcctcccagcccccgccagggtccacggcccgcaaatgcacgtcaggcccctcctgcccgcgatgcgcccacgcgtctgcccccacaaatggggaacactggtctggccccccgggatcccccgaggcccacaggttcctcttcgccctcgcacctacctacagggacatagaaccaagccccaggcctgctcagctacacgaccgccgctgggatccgcacttccggaggaaaatggcgaagtgggcggggcggcgcatgcgcagagagaaaagctggttcccaaggtccttgatggtaacatcattggaaggtgacactacatttcctatgaggctctgcggtcccccgttaggaacgcacgccggacattctgttttgcccagcagtgagtccagttacccggagacccggagttaatggatcaggactggtccctacccacgtgacacagatgtggcattctggttcgttattaaatcctggtttcacagcctgggacattgtgaaaataatggagaaattccaatagaaaccaattggtctatgctgttaatgagtaactttttttttttttgagatggagtctcgctctgtcacccaggctggagtgcaatggtgcgaccttcgctcactgcaaactctgcctcccaggttcaagagattctcctgcctcagcctcctgagtatctgggatcacaggcgggcgccaccacactcacctaatttttgtatttttagtagaaacggggtttcaccatgttggtcaggctggtctctaactcctaacctcgtgatccgccctcctaggcctcccaaagtgctgggattacaggcgtgagccaccgcgcccagccctcaagtctatttttcatagatgcattcgaaagcatgaaaaaaatcatgtctctattttactttaaatttttaaaaacacaactaatgaatatggtaattctcttccaatctgttatcttttatctcacgaaactaatttgtgagctttcaatttacacagttagaaaaaaatgctctagtgtatatactaggataaaataacagggtcataagacaagtgcactccataatctttgtgacaacttacacttccagtgtctgatgaacatttgcccataaactcccacgtttcatccatccatccatcaatcaaatctacctatctttatttatttattgtgcgaaatacctgaactttgcctttccttccctgatttctgccacaaactaggcaaggagttctgcctaggggtttttcagagctccggctaccaccgaggttcctaacagggaaattcccagcttgaatgcttggggttgatgtgggagtgcgtgtgaaacgggtgtggggtgaaagggcagtgaactttgtaggtgggtagatgggggtgtgaagggctttcaggtaagaggcacagaggaaactgggagaggcagcgaaagcacttcacgcctcagatcaccagaagatgctcccaccagcaccatgacagtttgccagtgccatggcaacacaggaagtccccaccccttgccatggaaacagctggaagttactgcccatttctagctatttctgagtaacccgccccttaattagcatgtcattaaaagtgaattataaaaatgactacaagccacccctaggctgctactctgggagcacaacccacagagggctccctgccctgcaggagcggacgcagggctgtaacaccgccaatgcctccatagagctgctttattccaccacaggcttgcttttggattccttcctgagcgacgccaagaacctgcccttcctcagtgtgactcttgcctaaaatctatccctggttttctcttttcctaagcatgccctgacttgttctttcatctcctctgaacttgcaattgctcctcagtgactctattctgcagatccagaaaactcaaccttaatcttcccagagccctgttgtctccaatattggaatatctagccttgctttctcagacgcctagattacaggcctctctcttgaacacctattggtaaggtatccggggatcctttaaatacacgatgattggcagggtttacataggggaaatcagtgcctgacaatttgccttccaggatatggattgtcattccctctctttgtgggccccagtctcctatacataaaagtagagattgtaatactcatttgacttgcagatacctcaccccgaacccacctactataatgtaaaagccaagaatgcaaaccctttcctcaccccgtgaaggtaaagtcctcagagccaaggagagaaggctcagggatggtacctgggtgtttccaacactaaccatgcattgtagtttttagtgttcaagtttaagcttcttatgttaaagttaccccagctttaattatattgtaacaagatttatttttgtaattccatttttggattcttgatttcttggtaaagaaatacagttatttttgtataccaatcttatatagtgttacattccaaaatttgttcatgagtcctaacactttttagtaaatttcttatgattttctaaatgcaagatcatgtcatctgtacataaagataactgtacttcttcctttccaatctagatgccgtttatttatttacattgccaagttgtcccagctaccactgttatcaagtaaaagggtctcactacccaaagctctagaagccagtaacatgacactgagtttttgagaagagaaaaactttaaagttaaaccaaaacctatgggatacaggccaggcgcagtggctcatgcctgtaatcccagcactttgggaggccgagttgggtggatcacaaggtcaggagatcgagaccatcctggctaacacggtgaaaccccgtctctactaaaaatacaaaaaacaaaaattagctgggcatggtggcaggcacctgtagtcccagctactcggctgaggcaggagaatggcatgaacccagaaggcagagcttgtagtaagccaagattgcaccactgcactccagcctgggcaacagagagagactccgtctccaaaaataaacaaaaacaagaaaacaaaaaacaaacctatgggatacagtaaaaacagtactaaggagtaagtttatagcaaaaagcacctacatcaaaaaaagtagaaaaacttcaaataaacaacctaataatgcatcttaaatagttagaaaagcaagagcaaaccaaaaccaaaattagtagaaggaaacataacaaagatcagagcagaaataaatgaaattgaaatttaaaaatataaaatatcaatgaaatgaaaagttaatatttttttaaaagatcaacaaaatcaacaaacatttagccagactaagagaaaagagagaagactcaaatacataaaaccagagattaaaaaggagacactgcaactgatactgcagaaattcaagtaatcattagaaactattatgaccaactatattccaataaattgaaaaacctgcaagtcatggccaggccccgtggctcatgcctgtaatcccaacactttgggaagccaaggcaggtgatcacctgagatcaggagttcaagaccagcctggccaacatggtgaaaccccatctctactaaaaatacaaaaattagccaggcatggtggcgtgcacctgtactcccagctactccagaggctgaggcaggagaatagcttgaacctgggaggcagaagttgcagtgagctgagattgtaccaagctccatcctgggtgacagagcaagactccatctcaaaaaaaaaaaaaaaaaaacacaaccaaaccacaaacctagaagaactggataaatgagattgaacccataataaaacatctcctagcaaagaaaaacctggatccaatggcttcactgattaattttaccaaacattgaaggaagaattactatcaatcctactcaaactattccaaaaaacagagaagtctgtaatatttccaaaatcattttatgtaaaagaccattcatcgtgtctaagtgggattcatcccaaggatgccaacatggttcaacatatgcaaatcaatcaatgtgacacatcatatcaacagaatgaaggacaaaaaacatatgataatttcaattgatgctgaaaagcatttaataaaatccaacttccctgtgataaaaagaaacccccaaaaaaactagatttagaaggaacataccacaacacaataaaaaccatatgcaacaaaccctcagccagtatcatcctgaacagagataacctgaaagcctttcttctaagatctggaacaaggcaagaatgtccacttccaacaatgttactcaacatagtactggaagtcctagctagagcaatcaagaaaattgaaaaacagtaaagggcatccaaattgaaagaagtaaaattattattgttttcttgtttgcaggtgatttgatcttatatttggaaaaacctaagaactccaccaaaaaactatcagaactgatcaacaaattcagtcacacgatacaaaatcaaaatgaaaaaatcagtaacatttctaaatgccaaaactgaacaatctaaagaagaaaatcaagaacgtaatcccatttacaatagctacaaataaaataaaatatctaggaataaatgtaacaaaagaagtgaaagatctctacgatgaaaactatagaacaccaatgcaaaaaaattaaagaagacaccaaaaaaaaaaatggaaagatagtccatgttcattgattggaagagtaaatattgttaaaatacacatacttcacaaagcaatctacagacccaatgcaatccctattgaaatactaataacattcttcacagaaacagaaaaaaaatcctaaaatttatatgaaatcataaaagacccagaatacccaaagccatccgtagcaaaaagaacaaaactggaagaatcacatcacctgacgttaaattatactacagagcaattgtaagctaaacagcatggtactggcataaaacagacacatagaccaatggaacagaatagagaacccagaaataaatccttacatttacaactaactcattttcaatgaaggtgccaagaatatacatgggggagaggacagtctcttcaccaaattgtgctgggaaaactagatattcattggcagaatttttttttttttgagatggagtctagctctgttgctcaggctgcagtgcagtggcgcgatctgggctcactgcaagctccacctcccgggttcacaccattctcctcctcagcctcccaagtagctgggagtacaaatgcccccaccatgcccagctatttttttttttgtatttttagtagagacggagtttcaccgtgttagccaggatgttcttgatatcctgccctcatgatctgcccacctcagcctcccaaagtcattggcagaataattaaactagaaccctctcttgtgctatatacaaaaatcaaatccaaatgggttaaagacttaaatcaaggacaagaaactactgaaagaaaacattagggaaactctccaggaaattggtctgggcacagatttcttgagtaatactccaaaagctcaggcaaccaaagcaaaaatgaacaaatggtatcacatgaagttcaaaagtttctgcatagtaaagaaaacaatggacaaagtgaaaagacaatccatagaatggaagaaaatatttgcaaactatatatctgacaagggattaataaccagaatatataaggagttcaaacaactctataagaaaaaaactaataatccaattatttaaatgggcaaaaaatctgaacagacatttctcaaaagaaggcatgcaggtatggcgcagtggctcacacctgtaattccagcattttggggagccaagacagttggaccacttgagcccaggagttcaagaccaacctgaaaaacatagcaaataattttaaaacctacctgggcatggtgatgcatgcctgtggtcccagctactcaggaggctgaggtgggaggattgcttgaaccctggtagtcataactacagtaagccatcattataccactgcactccagcctgggtgacagagtgagacactgtctcaaaaaatgagcaaaaacaaaaaagaagatatataaatgtcaaataggtatatgaaaagatgctcaatatcaccgatcatcagagaaattcaaatcaaaactacaataagatatcatcttacccccattaaaatggcttttatgcaaaagacaggcaataacaaatgcttgcaagaatgtagggaaaagagaaccctcttactctgttggtgggaatgtaaattagtacattcactatggagaacaatatggaggtccctcaaaaaattaaaaatagaactatcatatgatacagcaatcccactgctgggtatatacccaagggagggaaaattagtatatgaaagagatatctgcattcccatatttatttcagcactattcataatagccaagatttggaagcaacctaagtgtgcatcaacagatgaagggataaagaaaatgtagtacatgtacacaatggagtactcttcagccatgaaaaacaataagattgtgtcacttgcaacaacgtggatggaactagggaacattatgttaagtacaatgagccaggcacagaaagactttgcatgttctcacacatttgtgggagttaaaaattaaaacaattgaactcatcaagatggagagtagactgagagtttccagaggctgggaagagtagcggtgttatgggatctttggagtgtcacttttctggacagaaacctctatggctggtggcacctttacctgagttttgcttgggccccgcccactcagcctggcaggctgtgctcagctcatgctaccaggttggatcccatgtttgccaagggagactgcgtggagtggcaaggggtgtgtgagcaagcatggggtctggccactgtgcagtcagacttcctggctgctgcagtggggcaggtagctccaggtgccaacatgggtgccagctctccacaagtctgtggctggaccacgggcaccgcaagcagcttccgcagctggcacactgggaacacagtggcacccggaagcttggagataccaggaaccacagggccccaaagagggaatcacagccctggctcggggagctcccaggtctgggcttcccaaagggtcacagctcttgtttccttctctttgcccacaatgtggcaagcaaggggcatgactcagccctgtttgtgttacagctctttcagcctcttccctaggatttgtcataattaattctcatattgtcatatttttttacatttgtttcaacttcagaagatgcatagatctaaacacaacataatatgttagctagctgccatatgaatttctccgtgtttcaccactatgtagcctaaagttattccgtcatccatgactatcctggctaaagagtctaaagatctttgtttggtagctatggcttcagctagttcattcactaatttacctagagtggttgacagatttctaattatacgttcatgagaggttactccccaccattgcaagtgacttctgccaaacattggccaaaattcacctccttggtttgcaggtatggtttgtctaatcctggaaagtaatttcgatgaactacttcagtgttcagaaacattggagttataaatagaaagaggaagagtcacataacctaatagacaattacttctcatatgccagcggtcaacacattcataagcccatgggtggttgatccagggaccacacagggtccctgacagactctgaaagttaaggctttggtttactggtaacagagacaggttaaagtacatgtcttcagtcttgagtagagtgtaatcagtctcattttttttttaatgagacaaacatcaggtaaagaccttgacaagaaggaagagaaatcccgagattctataatcataataatcgaattgtaattgctagtttaagtagtccttcaaaaatacatctcattcctgacaggataaaacaagttttaaaaaatatattatattcagattcactagggaacacttggagccaggaaataattcaggattcagcccaaattataggcaaataataaaaactctaaaacaatgatcagggttggaatctaatagcatatgtcatagttttcttttggaacataaattttctctctagtccatcattttatcaaagacaaatcatagtaggaccaattttgtatgcaaaataagttttagtcttatcataccgggcctgattatttccataaagggcagcaagaatatttattggccatataggcttcttaaaattggctttgttggaaatttttaataaggaatcttagacttttaagagccttgaagctagtcaagtcaaagatttgcatcagactgtgtctgtaataattttttaacctacttttttaaattatactttaagttctggggtacatgtgcagaacgtgcaggtttgttacataggtatatatattctgcggtggtttgctgcacccatcaacccatcacctataataagcatttctcctaatgctatccctctccctgcccccaccccccaacaggccccagtgtgtgatgttcccctccctgtgtccatgtgttctcattgttcaactcccacttatgagtgagaacatgtggtgtttggttttctgttcttgtgttagtttgctgagaatgatggattccagcttcttccatgtccctgcaaaggacatgaactcatcgttttttatggctgcatagtattccatggtgtatatgtgccacattttctttattcaatctatcattgatgggcatttgggttggttccaagtctttgttattgtgaacagtcctgcaataaacatacatgtgcatgtgtctttatagtagaatgatttataatcctttgggtatatacccagtaatgggattgctgggccaaacggtatttctagctctagatccttgaggaatagccacactgtcttccacaatggttgaactaatttacactcccaccaacagtgtaaaagccttcctatttctccacactctctccagtatttgttgtttcctgactctttaattttcgccattctaactggcatgagatgatatctcattgtggttttgatttgcatttctctaatgactagtgatgatgagcttttttataagtttgttggttgcataattgtcctcttttgagaagtgtctgttcacatcctttgcccacttttcaatggggttgttttatcttgcaaatttgtttaagttctttgtagattctggatattagccctttgtcagatggatagactgcaaaaattttctcccattttgtaggttgcccgttcactctgatagtttcttttgctgtccagaaactctttagtttaattaggtcccatttgtcaattttggcttttgttgcctttgtttttggtgttttagtcatgaagtctttgcccatgcctatgtcctgaatggtattgcctaggttttcctctacggtttttatggctttaggtcttatgtttaagtctttaacccaccttgagttaatttttgtataaggtgtaaggaagggatccagtttcagctttctgcctatggctagccagttttcccaacaccatttattaaatagggaatcctttccccagcgctcgtttttctcaggtttgtcaaagatcagatggttgtagatgtgtggtgctatttctgaggcctctgttctgttcctttgatctatatatctgttttcgtaccagtaccatgctgttttggttaccatagcttgtagtatagtttgaagtcaggtggcatgatgcttccagctttgttctttttggttaggattgtcttggctattcaggctcttttttgattccatatgaaatttaaagtatatttttccaattccgtggagaaagtcaatggcagtttaatggggatagcagtgaatctataaattactttgggcagtaggtcactttcacgatactgattcttcttatctatgagcatggaatgattttccatttgtttgtgtcctctctcatttccttgaggagtggtttgtagttctccttgaagaggtccttcacatccttgtaagttgtattcctaggtatttcattctttttatagcaatggtgaatgggagttcactcacagtttggctctctgtttgtctgttattgctgtataggaatgcttgtgatttttgcacattgattttgtatcctgaaactttgctgaagttgcttatcagcttaaggagattttgggctgagatgatggggttttctaaatatacaatcatgtcatctgcaaacagagaccatttgactttctcttttcctaattgaataccctttatttctttctcttgcctgattgccctggccagaacttccaatactatgttgaataggagtagtgagagagggtatccttgtcttgtgctgattttcaaagggaatgcttccagtttttgcacattcagtatgttactggctgtgggtttgtcataaatagcacttattattttgagatacgttccatcaataccagtttattgagagtttttagcatgaaaggttgttgaattttgtcaaaggccctttctgcatctattgagataatcatgcagtttttgtcattggttccctttatgtgatggattacatttattgatttgcatatgttgaaccacccttgcatcccaggggtgaagccgacttgatcatggtggacaagctttttgatgtgctgctggattcagttttccagtattttattcaggatttctgcatcaatgttcatcagggatattggtctaaagttttcttttttttgttgtgtccctgcgaggttttgctatcaaggtgatgctgacctcataaaatgagttagggaggattctctctttttctattgtttggaatagtttcagaaggaatggtacgagctcctctttgtacctctcgtagaattcggctgtgaatccatctggtcctggaatttttttggttggtaggctataattaatgcctcaatttcagaacttgttattggtctattcaggaatttcacttcttcctggtttagtcttggtagtattctctgatgagaatatgcatttctgtgggatcagtggtgatatccccttaatcatgttttattgcatctatttgattcttctctcttttcttctttattagtctggctagtggtctgatttgttgatcttttcaaaaaaccagctcctggattcattgattttttgaagggtttttcgtgtctctatctccttcaattctgctctgatcttatttgtgtcttgtcttctgctagcttttgaatttgtttgttcttgcttctctagttcttttaattttcatgttaaggtgtcaattttagatctttcctgctttctcttgtggacatttagtgctataaatttccctctacacactgctttaaatgtgtcccagagattctgggacgttgtgtctttgttctcattggtttcgaagaacatttttatttctgccttcaattctttatttacccagtagtcattcaggatcaggttacacagtttccatgtagttgtgaggttttgagtgagtttcttaatcctgcatactaatttgaatgcattgcggtctgagagactgtttgttatgatttccattcttttgcatttcctgaggagagttttacttccaattatgtggtcaattttagaataagtgcaatgtggtgctgagaagaaggtatattctattgatttggggtggagagttctgtagatatcttttaggtccacttggtccagaactgagttcaagtcctggatattcttgttaattttctgtctcattgatctaatattgacagtggagtgttaaagtctcccactattattgtgtgggagtctaagtctctttgtaggtctttaagaacttgctttatgaatctcagtgctcctgtattgggtgcatatatgtctaggatagttagctcttcttgttgcattgatccttttaccattatgtagtgcccttctttgtctcttttgatctctgttggcttaagatctgttttatcagaaactaggattgcaaggattgcaacccctgccttttgttactttccacttgcttggtaaatgttcctccatccctttattttgagcctatgtgtatgagatgggtctcctgagtacagcacattgatgggtcttgactctttatccaatttgccagtctgtgtctttcaattgggggcatttagctcatttacatttaaggttaatattgttatgtatgaatttgatcctgtcattatgatactagctggttattttgctcattagttgatgcagatttttcatagtgtcaatggtctgtataatttgttacgtttttgcagtggctgttaccagttgttcctttccatgtttagtgcttccttcaggagctcttgtaaggcaggcctggtggtgacaatatctctcagcatttgcttgtaaaggattttatttctacttcaattatgaagcttagtttgcctggatatgaaattctggcttgaaaattcttttctttaggaatgttgtatattggcccccactctcttctggcttgtaggctttctgccaagagatccactgttagtctgatgggcttccctttgtgggtaactcaacctttctctctggatgccctttatattttttccttcatttcaaccttggtgaatctgatgattttgtgtcttggggttgctcttcttgaggaatatcttagtggtgttctctgtatttcctgaatttgaatgttggcctgtcttgctaggttggggaagttctcctggataatatccttgagagtgttttccaacttggttccattctctctgtcactttcaggtaaacgaatcaaacatagattcagtgttttaacatattcctctatttcttggaggctttgttcatttctttcactcttttttctcgaatcttttcttcttgctttatttcattgagttgatcttcaatctctgatattctttctcctgcttgattgattcagctattgatacttgtgtatgcttcatgaagttcttgtgctgggtttttcagctccatcagttcatttatattcttctctaaactggttattctagttaacaattcgtcctacctttttttttcaggctcttagcttccttgcattgggttagaacacgctcctttagcttggaggagtttgttattacccgccttctgaagcctacttctgtcaatccctcaaactcattgtctgtccagctttgttcccttgctggtggggagttgtgatcttctggaggagaagaggcattctggcttttggagttttcagcctttttgcactggtttctccccatctttgtggatttatctacctttggtctttgatgttggtgatgttgatactattcctttatgtttgttagttttccttctaccagtcaggtccctctgctgcaggtttgctcgagtttgctggaggtccactccagaccctgtttgcctgggtatcaccagtggaggctcagttggaaatgcatgaaccacctgccttctgtgttgatcccactgggtgctgcagaccggagctgttcctattcagacatcttgccagctctcctgtgatacttttatgaatgggtgtagtcctgtcttctcaaggtccccaaataacttgaggttcctgggccagtcagaaagtgacattctttacttcttaccacaaggacagcaactttgtaaaggacccttgtagacaagacaccaagccagtcattctaaggggctttgcattggtgctataaagtcaagctcaattccttaaagtggtctggttgtatctgccgttcgagttaaagacttgataaaacaaacagtgtctccaattgaatcctgttaccaaaaatagattcttattgaaattatgcaaataattatattgccataatttaggaatgctcacgaatggcttctgaattctggagaaatcagttagagagacagataaatggctcaaatttttgttcacaatgtagtttttctaacgtagggtaagttaaaaatagctgaaaagaaaaaaaattcttgactttggaaaacaaaacataaagagaatcaacaatgtttccaatggaagggccatgaataaaatcttttccttcttttataagttcagtccaatgtaactaaatcttgttctgcttgatttcaaagagcaattctcattcagttttttgtgttttgcttgatttcaattggaaattctcattcagctttttagagtcctggaagattttcctagtccaatggtatgatccccaaagttatctgaaaccatatttaagagaacttgtcagagtcctttccattaaaagtaatttagatgatagctgattgtaaaggcttttttttttttgagacatggtctggttctatcactcaggatggagtgcagtggcatgatcttggctcaccacaatttctccctcccaaactcaagccatcctcctacctcagcctccgaagtagttgggaccataggcatgcaccatcatgctggccaatttttgtatttttgtagagacagggttttaccatgttgcccaggatgctttcaaacttctgagttcaagcaattcacccacctcggccttgcaaagtgctgggatttttacacgtgtgagccaccgtgccctgcaccacgcccagcaccgtgccctgcacagtctccagcagcacgcccggcctgtaaagggttttagagaagaactttaaacaatcaccgtggatgacaaaaacttagaatatcctttggttaaaatccagtggaagttctcgacctgcgagaaaatttatttatttctattatatgtagcattttaagataacagccagaatcatgactgatggcaacacatcagatccatcagacttccacaaattttatataatctttagaatattcatattaataatatatctatacatatacaactttagagaatatttaacatcatcaaaattatgactgataccatattagatttttataatttatataacatttaaaatatttatattaataatgtacctataaatgtaaccaaaagaagatttaggccaggcacagtggctcatgtctgtaatcccaacactttgggaggccaagttggacagatcatcagaggtcaggagtttgacaccagcctggccaacatggagaaatcttgtttctactaaaaatacaaaattagccgggcgtggtggcatgtgtctgtagtctcagctacttgggaggttgaggcaggagaatcgcttgaaccttggggcagaggttgcaatggacctagatcacgccactgcactccagcctgggtgacaaagcaagattctgtctcagagaaaaaaaaaagaagatttagtgttacttatcttttggcaatgcttcccatacaatgttatcaaataagatttagcaaagatgtcaaaaaattgaaaacatttgaccaaaacagaatgacagtttattgttttttattttattatttttttgagacagggtctcaccctgttgcccaggctggagtgcagtggtgaaatcatggctcactgcagcctcaacctcccaggctcaggtgatcctccaccttagtatcccaagtagccaggactatgagcacttgttacgacacatagctagcttttgtattttcagtagagatgcggttttgccattttgcccaggctggacttgaactcctgggctcaagtgatccacccaccttggcttcccaaagggccagaattacagacatgagccgctgcacacagccacatgtcatttttaaataacagtcattcatttaattagcatgacaaccaaaagacatcaaaagcaacgtagaaggttacatggatgtgataactgaaaaccctcagttttcccaagtaattaaaaaaaaataaaggcaacacatggattatcttgataaaacctaaaatctttattacaggccagtcatttaaagggtaaaactcctgtggcataactgtgtcttcttacgggaaactaatttaaatcacttggaagtcaattccgatgacaaggagacttgaatttaattagacatagaaagagtgtgtccagggtcatgagtgagcataatattacaaaggaatgtcaacaggaaaaccagagcatagagcagtggggatccatagctcacaatgatagcaagaaagtttcctggttacatgaagtaattaagacatatttaaaagccaagagtataaaattagacctgatgaaaaagctgaaggagttatcatcccagccaagcaggaaacccaagccttttattccttctcaagaaggaacaggagacagtgatgtgacctgtgagtcatgtgtaacatgaaagtacaggaaaagttgaacttctgatatacaaatctgaaaagtttttatagtaacagatttcaggattaaaagtcaatatttattacctcttattatgagcaaataaatacattaagaaaaccttgttgttttaacccaaatttttagttttttatcactgtttttaatattatagctaatttaaataaactttataaacaatctatctgatctcaatcagttttggcctcgatgtaagatttacataaacttttaataaccttgtataattttttcatctttcccaactttttatacacatgtagttttatctatcttttttattccttcaatttaaaataatccttaaaaatctctaagtgaatttactttctctgaaacaaaaaccggtatacattttgcatacagaattgtttctcttgtatctagtagtcttaatcacacatatctagcaagatattaacacttagtaacccttattttaataaaaaacctaggaagcaagaaatctggaattgtcatatagcagtatcttacatatgagaataatttcataatttagaattatgtgttcctaaaacatattttttaagatggattttcgctcttgttgcccaggctggagtgcagtggtgtgatctcagctcactgcaatctccgccccccaggttcaagtaattctcctgcctcagcctcccgagtagctgggattacaggaacccaccaccacacctggctaattttttgtattttttagtagagatgaggtttcaccatgttgatcaggctggtcttgagctcctgacctcgggtgagccacccgccttggcctcccaaagtgcagggattacagacgtgagccacagtgcctgggctaaaacataagttttaaattggaaataacccagatatttaatgagtatctattatttaatttaacataactaaaatttcaaaaataggctgggcatggtggctcacacctgtaatcccaacactttaggaggcctaggcaggagtatcatgaaaccagcctgagaaaactagtgagatgctgactctacaaaaaaaataaaagttagctgaccatggtggtgtatgcctgtaattaacagctacatgggaggctgaggtgggaggatcccttgagtgcagaaggtcaaggttgcagtgagttgtgatcatgccactgcacttcagcatgggtgacagacagagacactgtctcaaaaaaatttcaaaaatacattaagatgtcttgtatagacatttatccatttacatttacttatttttgacagtttatctagagtatttgtgagaactgaggtattagacaaagctagtcatcatttctaggttattttcttgttaaccatgttatagcctgtgaatatcaggtgttcacgtaagtgaggacttcaaagttaaatacatgggtattttaccaataactcagaaaattccattatttttgttcaacaaaccatattaaattggtcttatgtatttaaaaaatcacataaacaaatattcttttttcctgtgtttatagctttataaccttcatgccaaaccctagcaccttaaaatatctagcaaatgtaaatataaaacacagtcaaaaatgtatgctgacaagtctgaagagatttctattttctatttttattttatcaatactttttaaattatttgtatttataaaagaactcttttgtctgggcacagtggttcatgcctgtatcccagcactttgagaggctgaggcaagaggatcacttgagctcaggagtttgagaccagcctgggcaacatagtgagacccaatctctactaagaataagataaaaaattgccaggcatggtggtgcgtgcctattgtcccagctactagagaggatgaggcaggaggattgcttgagcctgggaggttgagataacagtgagctatgatcccactactgcactccagtctggggaacagagtgagaccttagagtgagaccttgtctcaaaaagagaaaaaaataaagaattgtttcattcttttgtttttcttcagccaagtgaccttgaattagtaacaccacagacagtaagtcttatctcaacaccagtagacaaatcagcagattcaaagtaggcagggaaaaaaaaaagataggcaaaagaactgagactttttcactttagggtttttaaaaatagtaactatttgagttctgaattttctttcatgtaatttggccatcaggtttaaagtgtgcactagaggtcaggtgcagtggctcatgagtgtaatcccaacactatcggaggctgaggcaggtggatcacttgaggccaggagtttgagaccagcctggccaatgtgacaaaaccccatctctactgaatatacaaaaattaactgggtgtggtagtgtccacctgtagtcccagctattcaggaggctgaggaaggataattgctcaaacctgggaggcggaggttgcagtgagccgcgattgtaccaccatactccatcctgggcaacagagcaagactctgtgtcaaaaagaaaaaggaaaaaaaaagtatatatatatgtataggctgggcacagcggctcatgcctgtaatcccagcagtttgggaggccaagacgggtggatcacttgagatcaggagtttgagaccagcctggccaacatggtgaaacttcatctctactaaaaccacaaaaattagccgggtatggtggcgcacacctgtaatcgcagctactcaggaggctgagacaggagaattgctcgaacctgggaagtggaggttgcagtgagccaagatcacaccactgcactccagcatgggcaacagagcaagactctgtctcaaaaaaatgtgtgtgtgtatgtgtgtgtgtgtgtgtgtatgtgtgtggctagaatggtccataatatatagccagctcgagtcccagaaaacctagcaagcttaaggttagagcttctcattttggccttttcaagattaaatctcctttagtagacccttcccctctagggaggtacttgccggagcgctgcctgaagttggttttctgatgccctgttgtttctgttctgaatggtttatttctcattataagagctcagcaaagcaggcagagttaaaaagcagagacatgaaggctttaaaatcatggacttcactcctacactgaatctcaggtccccagaaagacagaaacaccatgggaccacagcaaaggcagaaggaggagtgagagagggaggtggacagaacaacaaacaggagttggctctcattttttcacgcgtgccattttctttaggtttttctagtttatggagactctttgttccagttgagcacacagataaactagagatctcacaaggcttttgctgagaacatcaaagcctttaacctctgttgggccaaatatttagaccaaaaatacagacagacacacaaaagccagaaccggaccagattgagtagcttagtggctacagcctttattccctttattctttaggatacgaactcaaaccagattcagggttctaacccaaccaggacccccctggggtgaaactgaaaccccacagtctagacaaggttgggggtctttttttatttttttgagatggagtttcactcttgttgcccaggctggagtgcaatggtgcaatattgcctcaccgcaacctccgcatctcaggtttaagcacttatcctgcctcagcctcccaagctgggattacaggcttgtgccaccacgcccagctcattttgcatttttagtagagacggggtttctccatgttggtcaggctggtctcgaactcccaacctcaggtgatccgcacacctaagcctcccaaagtgttgacattacaggcatgagccaccgtgcccggcctgcttgttcttttcatttcatcctgatctccgaatacaggagagtagctgatttggtgttcactaacaagcacagaagctttgttacatttacagtgtcattcttggcaaaacctgaagttttgcctcctggattcatgccattctcctgcctcagcctcctgagtagctgggactataggcgcccgccacctcacccagctaattttttgtatttttagtagagacggggttttgccgtgttagccaggatggtctcgatctcctgaccttgtgatccgcccacctcggccttccagagtgctgggattacaggcgtgagccaccgcgcccagccagaagctctaatttcaatgatgattgtgctttttctctcttcctcagcatctggctcatgataaaatttcaggtgtcttgatggtatctaaatcagttgttgattcagtcctggagaaacacaagcataacctctatgccaagttataattttacctatttcccaactttttgttattggatctctccaccaaaccagttggtctgcttctgtctttgcagctggtttctgtagatgctgttcagctgctggtaacatctggcctttgggcaggctcaaaaatttgaaagttaataatgcaagattcaattgtgtatgggctatcccgtaatccctgtttctccccattttttgtttttattatcagttgttcatctgtatgaaatcttaactgagcattttcaattaactgtgtggaatgacccatgtatgaagaatcagaaatcacattaacaggcatatcaaaagcagtcaacacctcaattacagctacaagctccgccttttgagctgaagtatagggtgtctggaaaactttagcttttgatccagaataagaacctttaccattactagacccatctgtgaaacaatgaaaacgcttagcaggctgcaggttgtttactgcaggaattgtaaatgcaaaccgttcacagtcttgctcagctaaaagggtagtaaagaaacagtcttttaaatctgtgactattaaaggccaattttttggaattatagtagagaagggaatcctggctgttatatttccataggttgtataactgaattgatggctcttaagtcagttaacattttccatttacctgattttttcttaattatgaaaactggagaattccaaggggaaaatgttggagctatgtgcccattttctaattgttcagtaactaatttctctaaagcatccagtttccctttgcttagcagccattattctatccaaattggcttatctgttaaccattttaaaggtataggttctggaggcttaactatggccaccatcaaaaatggtatcctaatctttggcaggaactttgtctttccgtttgaagcagttctttcaaaccttgcaattttttttctactcctataccagggacatgccccattttgtgcatcatatgttgactttgagggctgtataattgttatggaattagaacttgtgctccccattgtcataataaatatctcccccataaatttataggtacagaagttgcaattggttgaacagtcccaggttgtccattgggcccttcacaatgcaaagtatagctactctgatacacttctggagctttagcagtttccactgtgttaaattgagtgggctgaattggccacatggatggccagtgctgtagagaaataattgaaatgtccactcctaccaaaaaaaaaaaaaaatagtatctaccaaacctttaaagttctttccatggatagttatttcacagataggatgtttatcagtaatttgatttacccaataagctgccttgccttttttatttgtgcttccaaatcctccagttcatttaatttcactttttcccattcccacatacggcacactcaggagctgtgctatgcgcactcctggctgtgctttccagggaacagaactaaatatcacaatttgaatttcctcattgtaatctgaatcaatgactccagtgtgtatttgtaccccttttaaacttaaactagaccttcctaaaagtaatcccattgtccctgctcgcaacggtccacagactcctgttgggaccttttgcgggggtgccccaggcagaaggctcacagcttttgtgcagcatagatctactgcagcactatgggctgtggtggggaaagataatgtatgggggtgagggaatggcctgagatggaaatgccctggtttagaacagggcctgggatgggcctctcagggagttttccaaaatcgggttcccttctttatcaaacttagagtgacactgattagcccaaagttttccttttttacattttggacatatttcaggatcagcagttttgttttttcccctatctggtggcctgactaggtgattttttttttttacattctttttagtatgaccatgcttcccacagttaaaacaagctccaggaaatagagtatttcgtttatccactctcagtcctgccatcgcctgtgccaacaaagtagctttatgtagattatctctgatatcatcacaggccttgttataatcaactaaatgtgctttccctctgataggtcgcagagcagcctggcaataaggattagcattgtcaaaaccaataactgcaacactatatcctaagcagccaaatctgcaatcatctttttaagagactcctgtaaccaagctataaaatccacatatggttctcttggtccctgttttatagcactaaaggaagggtattgttctccacatgaagtgatttattccaagctctaatgcacactcctctaagctgttctatggcatcatcctgcatgaccacttgtgcatgtaaaccagcccagccaccaacccccaaaagttggtctgcagttatattaatttgaggttgggcccaggcattgcgagcagcctgaatggaagcttcatctgcctactaagttttaaattgtaagaactgagcaggagttagacaagctagagtgaaagtgtcccagtcagtaggaatcatccgactggaaacagcaacattctttaacagtcccatttcaaaaggagaacctggtccatactgatttatagcttgtttaatttttttgagtaatttaaaaggaaaaggctcaaatgtagctataatatttccctgttgatctggggggtgtattcaaacagggaactgccaagcctctaaatcccacttttgtctagcttgctgtattcctgcctgaatagaactaagagcagtcgctcaaggcgctgctcgaacagtcaccagggcaactacttttcacccagtgtcctccagaaaagaaagatctggagggtcgttttcttcaaaatagtaatgagggtgtgcagaaggatagggatgaacctctccctccttttctgctttagctttaggtgacaaataaacctggtctgtaacctctactgttactttgttatactctccttcctcctcatcatcagtgtgaaaaagttccaaggtagaacgaaccacagcccacacttgtcctattgctaccctgatgcttccgagctccccttcttactcaccacggggattgctttaagagtactcgggtgtcctccagctagttccacattctccaatcgttgctccagcgatcctttgacctgtatttgagcccccatgaatgggcaccacttgctgagaccaggtctgttggagagaccctaacccagcagcactagaggaattaaagacacacacacagaaatatagaggtgtgaagtgggaaatcgggggggggggggcgggtcttacagccttcagagcagagccctgaacagagatttacccacgtatttattaacagcaagccagtcattagcattgtttctatagatattagattaacttaaagtatcccttattcttaaggcacagatcactcatgctatcgtttgtggcttaagaatgcctttaagtggttttccaccctggacgggccaggtattccttgttctcattccagtaaacccacaaccttccagcctgggtgttatggccatcatgaacatgtcacagtgctgcagagattttgtttatggccagttttggggccagtttatggccggatttggggaggcttgttcccaacagttcctcagtgtaagggtgccctaactcctgtggggaccttctttggtggctccccaggaagtaaggagatgggaattgtgctgtagaggtctacagcagcactgcttgctgaggcgggggacaattgctgtacatatgtaagggcagtggctgtgctgggtatgcctcagtttgttgaggggcttgaggcgggtccctcttcctatttcctgaaagaggttgtccatctttgctaaatttagaatgacacggacttgcccagtgattgcctttcttacaccagggacgtacgttgggacttttctgttgattgatggtagtagttttcgtcttttgaattcctttctacattcctttcttgtgtccaatttgcccacaattaagtcaagagcctgagaaatgaagcatattttttcttactcttaatctagccacagcctgagctaaaagaataaccttatgtaagttatctccaatgccatcgcaagccttaatatatttagttaaatgggccctctctgtctgggatctaatagcagtttgacactctgcattagcattattgtacgcaagaagctgtattacaacatcctgagctgttttgatcatttgcggctttatacacagcctcttggagctgagcaataaaattaatatatggttctttaggtccttgtcagacagaactgaaataaggatacttttccccggtaacatttatccttttctatgtatgtaagcacatgaagcacagctgaacaatggcaacatcttccattagtgcttgattctctaatcaaccccagttagggccaactcatattaactgatcaaagaaaacaggcacaggtggctgcacttgtgtgttttcttttgcctgagtttgagcttcatcagcctaccaagttttaaactgcaagtactgagatggagtgagaacaggttttgtcaaagtatcctaattatatggtagtaatctattatcaagagccatatttttaaataaagtttgcacaaaaagagagttcagtccatattgactaatggcttgcttaaattctttagtaacttaaaagagaaagcagcctaattagctatattctgtcctacttgctggattatagtaacgggaaattgccatgcttcaaggtctcccttggctttagctttttgaatagaattttgtctaccaccaccaattgctccaggttttaatgttgtaactacaggagcagtaagtttttcagctaatttattttctcacccatttagaggagagagaggaggtggccattcacttaattcagcaggtggagccaacgggctagtaaaacatacttttaaaagtttttctttcttttctttaatctcgtctggtagctgctccccacactcagaatttgaagttagttttttacactcatcctcctcttcctcatctgagtctgcctcatcatctgtttgaaatggctcaagggctgcctttattagtgcccacactgaccatacagaaactagaatttctgctccatctttatatgtcttttaaaaaatctcttccaattctctcccattcatccaacttcatagtcctttgttctggaaaccatgggcaaaactgctttactgtactaaagagtgataacaaattctaagtactaattttcattccccatctttgtatgtcctcgggtgtcttttgatgttgtgtcctctgctttcacatgctccagccttccttcaccgggtctttgtcaccccatgttgggcgccaggaatgttggggtgatcagacccaacactaggtcatgggggtgatgaagtccggcagagtcaaaggaatgagaaaaagacagtttgagagagaaagtgggaccaggagaccatcacgagtgtggagcctgcaaagtccccaagctctgggagcctacgctatttgttggtgctcaaacaaacaggtggagaggatttaggggttgaaaggaaacggtgtatcaagtgaatgagaaacatatggccctgcctcagcttctcttccaacactcagcttttctcccaacacattccccttatgaacaggaataaaatagggatgcctgttctcaccactcctgtttaacaagtcctagccagagcaatcaggcaagagaaagctataaaaggcatccaaataggaaatgaagtcaaattatctctcttcactgatgatatgattctacacctagaaatccctaaagactgtgccaaaaggctcctagaactgataaaaaaaacttcagcaaactttgaggattaaaaaaaattaacatatagaaagaagtatcatttctgtacaccaaaaatgtttaaactgagaggtaactcaagagtgcaatcctgtttacaagagcaacccccaaaataaaataaaagaaaagaagaatatgtctaagcaaggaggtaaaggatatctaaaaggagaactacgaaacactgcagaaagaaatcatagatgacaaagcaaatggaaaactattccatgctcatggattagaaagatcaatattgttaaaatggctatactgccaaaagcaatctacacattcaacactattcctatgaaacaaccaatgtcgtttttcacagaattagaaaaaaaatattctaaatttcatatggatttttaaagagcccagacaaccaaaggaaacctaagcaagaagaacaaagctggagacatcacattacttgacttcatactataccctaaggccacaatagacaaaatagcatggtagcgatatgaaaacagacacaaagaccaatgaaacagaatagagaacccgaaaataaacatgcacctacagccatcagctttcccagggtaacacaaagagagccaagtggcacctgcacattacgctgtggaagaaaaacccaagctcaagaaacctcaacttgtattatgggaagttcacttggctgtacccttcccaagagggagaaattatctgcattatactagacagtaaataaacttttcctttgttccagaaggaggtactggttttctattccaaggctgttttctatacaaacatgcttgaaaacaatcatttggaacaagaaagtcagcgtccatacttgcaaaatgtgtggaaatcaaagagacccaaaaactgtttctctaccaatttctatttttttaaaatcacattttccccatataataagcttttaatatgtgttaatattctgaaattgtcttagcatttacccccatttctgagtcctgaaggatacaataaatttaatttaatttagtaacacttcaaatagtagtgattgtaatagcagagctagtttgtagcataaagaaaaaataataatattaggtgacacaaataatgctagccaccatttctaagtgtcatggtaagtacagtgattattttctttttttctgactcttttttattgtatttttttattttttttcccataggttattggggtacggtggtatttggttcgagtccatgaataacttctttactggttatttgtgagatttgggtgcacctatcacccgaacagtgtacactgcaccttatttgttatcttttatccctcgccccccaccctattaaataatagacaaaaaataatgggtttagaataaatgagttcaaatgaattgtcaaacctatgtgggaaaagtggaatcagtttgtgagaaaaaggaaaaaacctcaacagaaatgctgataaagcatcatcccttcatggctagagctgccaggacactagaacaccaaaatcagctagggaaattttgtagaagtcccagatgtactagatgttctgtgaatacacagagatataattataactgttacctgcatgtagagtaaagatgagaagtcattggtcatggtggcagctacctcaggagttacaaagcagacgtggttccaggacagtgtatgtcagggcaaagctgtcctaggacgctattaggagttggttatggcatagacattgtaagtcagatggtctcattactttcaatgacaaaaccaaaattacttttgtatcagcctaatacaacggcctggcaagagcacagaaaaagtccctgtgctgttaggtggggacctctgatgcagcacaattccttcattcccttctccaaaacccccctcttccaattccactgaagagagaatctgatggaagtgctgtgtaagtaggctcagatatatctaccactatagatagtagaggtgattcataaatccaagcctatcaaatacatcataaaaaagttacacgtttaatttttttttgaaattagggatcatgatataaaagttatcagaatcaaaactgtcagtaatctttaaaaagaaaagaaaaaacctggacaaatagattcagagaaggccttgaagagagggttctcatgcttctaggcctgatacaaactgtcacaaaatccacaaccttgcacaaaggccatagcaaccttacacaaaatacacttctgtgaggacatctatccagcaaccacctgctcaaacttcaactgacatcgaccttgttgttgatctttatagtcaaagataactataacaaaacaattatataagcctgttcatttttcctttatttatttttttctactcccccataattccaggttgatcacttttcttttaaagaccttgtcttcctttaccatttgaatctacacagtttgctttgtcatgcatattcccattgcagtgccctcctccctaagatgtgtctttttcctttagagaacctttctctgtttgttatttaggtttacaatgagaaggcgtgaaaagtaattttactgtcttcctaggaaaaaatcactgacttacaatatttatatttatttatttacattcctggggatgaggaattaaagatttcacaaattttcttattgagaagatcgaagttttcatgtgagcaaaactgaatatgtaaattgatatgtaaattatgctgcagataatatgctcaaatgtttacttgtatttaatttgttacacatgaatattgcatatgtaagataatatactaagaaattatcacatttaatgaaatgctttaatcaaattcctgattgaatttttgatatcaatatctttttccttgtttaatccatctttagagtgaacagggctgtctaggccaaagtcctcacttctatctaaattgtctgagttacagaactttttgaatttattatgttgtcacaggaagtttcttattgcttgtttaaaggagtcgctctcaatatgatgcggaatccaaaagcactgaagggcatatatcctgagtttctgttactgaagccaaaggttgccaatttcttgtagatcctgctagagttaaacttcatttaagtaatcattaaaagctgcatttattccctcacttgaacttttgatttcacactattaggactaatcctctaagtctttgctaagttatgttcctccttttcttgtggcttgattctgatgctctctatatgcaacatcaattgatgtaaagtacattcagggtaagagagtttctttaaatattactttgttattcaaaataatcacaaaagcactcatcgtaggaaaacttgtgaggactcaaatatagggaaatactttttctttctaaggcacaattctctaaagaagttcaccttaatttgaatatacatgggaaaatatccttgttcactaatagtctatattcactctgttttcttccctcatagaccagccggttcactattattttccaaatgatgtttgcctctttagagtccaggctatctgcatatctactttttcccacaaattactgttttgaattgcactgaattcaattcaaagggatgtcatttataaacagtgcaaatatatactgcacgagggatcttagaaatcatacacatggtttgatccataagctcatatgagcgtgcaatgtcaacttctttcatgtttttttaagtccacttaaattctattttaagccaccatctgcctgtgctgttagggcagttagccttcaatcattttaagatgctcctctctaagtaccgtgataatgatagagatatcaccagtcaggtgtcctaggaagccgactccgagttggagatttgcatgcaaggaggttgaaatgatattcccaacacctgtggaagagtgaaagcaataggattgggcggagcaggaagtcggctagaatgcaatcactatcatggctgcagtccactctacagggatcttggtgagtttacctaatgacctcgaattggagcaagaaaaccaggccattatatttctgtaccaagcagttctcggatgtgggatgccctgagaagggacatgaacttggatgaaggaactttactgtgctgtgagtattgttgccaggagtcagctgtcaacactcccaggagacgggaaattatgctttagtcactgaggcggcatctagtgtcagaccacagccttgttaaacagagccagactttggaggatggttggtgggtttaaaatttggggcttgacatcttgtccccacaagctgctgctggcctcttccttgtccatttctgtgtggcctgtttaggccccccagcttcctgcttcttctttaccatatttggaatgcaaaaatctacacgtaatttggcccatggtcccttctgcttagacatatccttgtagctatttttttttttaaagatgactatgtcttctagaatatttctaagaaattgcctaagtcaccactgctcaccaagaggcctttgttttttcctcttcttaaccatgggaaaggaatgtaggagggtagggagtggatattttctaacctggaaaaaactcattttaccctatataattttttttagcaaattccttctttgcacttactccacaatctttccaaattctcccaaatgctcaagcttttaaaaaacaaaagacagaaagatagcaggttattaggttttccaccaaaccttttctttctattcctttacatcagtgagcttagaataactctgctcctggaactgggaaagggacttgggaaaagaaagaaaaaaaaagctcccaaagtttagcatcacaaaacattatagtcactgctattttattatttatttatttatttatttacttttgagatggagtcttgttctgccaccaggctggagtgcagtggtgcgatctctgctcactgcaacctccgcgtcctgggttcaagtgattctcctgcctcagcctactgagtagctgggactacaggcgtgtgccaccacacccagctaatttttgtatttttagtagagatggggtttcaccgtgttagccaggatgatctcgatctcctgaatctgtgatccgcccgccttggcctcccaaagtgctgggattacaggcatgagccaccgtgagtgaccctgctttgtaagttttacatcatatatcccctgtgttagaccaagagcttgtaaaagccagaagacatacaccatttatcgttcaattagagatgttcactgataaaactgattcttccatctgagggtggtaattgtagttacagtaatgtagatgacaatctaagttatgttctataaactgtgtcactgacatctcaatctacagctaactttgattttttaaaagcagaggagtgggttgtataggtttagaaatacatccatcaagctagttaagtgagatggattcaagccttcaactcactggaatatttaccaaattgactattcattagctaaaggagccatataaacaaggtactttttaaaattcaaaattatgtaaggttttatttcctttttatgttgttatgaattggattgtagaggttataaggtaaaataagattacttttacagtaaaacatacaacacattgtcgcaagagggcagcctttgaacacgaattgcttctcaggcattccttgaaattttgagacagttactttaattaacacaacaaaataataaaacactacagaggatctaagaagatactttgacttatgcatattgttacttttttattactgctagtggaagatgtaatcgacaaggaaggtaagggctgaatttgttttatgtaaaaagacaaatttctttgggttttagctttcaaacatcaagatagtaggtcaatgtctaaatgagtgtatcaaagttctcacaatggcacatgtaaattcacctcttgtctacccaaaactctaaccaagcaaaggcaagttggaagaatcagacaaatgtaagtccctaggatacataaatgccacgggattttatgtttttaactttcaacctcctaagtttcactaagagacatgttatttggagaggttgctaaagtgtatttgtatgatgtctctgtttacggttggtctggacctctttctgtccagtggttgccctcaactgatgagagtcacctctctaaagatcatgcttacgtccctggagcagtccgcagcactatcaatgtctgacgtccacctttttccaattaatatttctgtacttactgaattggaaaacatacaggtgttttttgcctggtcacttgtggttttacaacactccccccgcttccccaccactgccccaggtgattttgatgccagccaaagtgtgagaactactggcagctgctggccgacagcagcaaaggcccaaatcctctgtgtgacttcaagacccgtatctggttttcagccatatttccttctccttctcacagctgagtccactcctcctccctcaccacctgtaggctatgctttccagcctgtgtccaggattagtcctgatgtaaggcacgtggggtttaaggagctctctcttcagtcttatttccacaccatctctgacagatatattccagttgtaatcatggggctacctcctcttgtttccagtcccaatctcgttttctctatcacattctaccttgtaataacctaaatcttctggtgggcaagcttcttcctcaatcaaatttgtgtttatgattgtgttggggattggcatagtaatccaggtactgctactgccttgaaagcggagactgcatccttctgtctggatatcttgagtttctggattgtaaaccttattagggcccatttttcctagaattggagcctctactttgttcttgctactttagttcacccagaaagcacgatctctgcctgaatttcaaagtgttggctagtttaaatatccttttgtgagacttttgtcttcctgcggggtgattttttcatcttacatatcattgctaatctttttaccttgaatataattgaaatagttttaatctgtgttaccagcaacaagaaccccttttatgagatgaagaggccaggtcagtctcataacttgtgtacccctccgtgtgttgaatttatgtcagagccaggttctttcctatttgatgtctctcaccaaattccagtgtttatgtcctaggaggtgcccaataaattctagagttgatacaagctgtaattttagagaaattaaattagcaagtagaattagattatatacaacctaatcaacttttttttttttccctgaggatgaccaagatttgggcttcagtgacaatagttatcccctaaatatttatactcaatctaggatcaccagtaaaatgttgaatagaggtgatgaacacacacatccttttcttgtcctaatctatgtggtttaaacatttacgctttcacaattaaatataatattgtttatatgttttgttgtggatgctttccaccacttctaaaaaatttctttttctagcttgctgagagtttttttttttaatcagcaatagatatttctccaaagaaaatatccaaattaccaacaggtacatgaaaaaaatgctcagcatcactaatcatcagggaaatgcaaatcaaaaccacaaagagatattgcctcaagcctgttagaatggtctgattaaaagaaaaagataacgagtgttaacaatggggagaaattggaacacttgtacagtgtttctgggaaagtaaaactgtgcagcctctatggaaaacagtacagttgttcctcaaaaaaattaagaaagtagaactaccatatgatctagcaatctcacttcaggttatttatctgaaagaattgagattgggatgattctcaggctcattgcagcattatttacactaatcaaaatgtggaaataaggttaatgtttattggcagatgaatagataaagaaaatgtggtatattcatacaacggaatattattcagctttaaaacaagaaaatccggcaatatgcaacatggatgaacctagaggacattaatgctacgtaaagtaaatcagtcacagaaggacaaactgtatgattccacttgtataaagtatctaagatagccaaattaattagaatcacagattagaatggtgatagccctttaagttgaaatcaattttacattcctgggttttgtagttttgctatcaggattctgactcataaaacaagtttggaattccccccttcttctgaaataatttaaaaattttatttttttaaaacgtttgaaagaattcaccagcaaaactctttggatgtggagtttgcttatttttttatttctttagttttatgtttttatgtgcaggtatttgacaatttaattactttaataaatgtcaattacttcatatattccatttaatcttgtgaaattttttataagtttcttttcaaggaattcaccctttcatccaagtaatgaaaattagtataaaatgtttcacaatattctattatcttgttaatgtctcttgtgtctacaactgtacaatctcattaatccctgatatttataatttgcgttttctttctttctcacagaactaacttttggccatgttaattttctcctgtgtctgttttctgtctcattgatttctaatttctgttttattttctttcttctacttgttttggacttaatttgttctcttgttttagattttctttttaaggtagaaaattagtgcacttgttttgaacttctcttttttagaataagcatttatacaaaaaatttactctgggtctgcttaacttatcccacatattttgatatagtatatttttatttgtattcagttcaatgtattttaaggtgtttcttatgatttcttccttgagctaaagggcattttaaggtgtatttaaatcttccaatagtgtagactttcctgggtagcttgttttcacccatttcaactcattttcattatggtcagaaagtatactttctatgattacagtgttttgaaacttcttgacagatattttgtggtctatagcctattgataaatgtttcatgtgtagcataatagaacatatattctattttcttggtcaatatcgattaggtcagggtgttgtcaaaattattttaccttaactttctttagttattctatcagcaatacagcattatgtcttcataattacttgacattttatcattatgaaatagctttctgttgtaatattgcttgtttggaggtctactttttcttatattaatatagccacataagatttcttgtgcttgttgtttccttggtatacttggaaattatttaactctcaacttatctataccataatatttggcatgcatctcttataggtacttttattatatagttggacaatctgtgttttatttggagtatttaaattacatttgaaataattattgataaggttggagttaagcctactatttttgctttttttttttttttttgagacggagtctgtccctgtcgcccaggctggagtgcagtggcgggatctcgcctcactgcaagctctgcctcccggattcatgccattttcctgcctcagcatccggagtagctgggactacaagtgcccgccaccatgcccggctaatttttgcatttttagtagagatggggtttcaccgtgttagccaggatggtctcgatctcctgacctcgtgatccactcgcctcggcctcccaaagtgctgggattacaggctgagccaccgcgcccagcctattttgctcttatcttctatttgttccatcattttttgctcctctgttctttctttcatgcctttttatattaactgaacaatattcagcgttccattttaattcctttattggcattttagaagaatatcttcatataatgtggtggttctctagggattgtaataaacatcctgggcttatcgcagtccacttactgttaatagtcaacgttttcatggaacataaagaaaagttgtggcaaaattgttgcgtttagtctcctgtcagagctattaatttagaatattttactctacatacgttatcaatagtactcttaattttttatttaaaccatcagttgtttgttataaaactaaaagaaaaaagccttagtttttcctgtttatgcacatgccattcctagagcttctccttacttcctgtaggtcagaatttccatctgttgttatctttctttagtctaaaaaatttccgtttgcatttcttgtatctaggtctgctaatgacaattgttcgaagctttcttttatctgaataaatctttattttctcaagaattactttttctagttatagaatttggagctgacagttttttttttattttgaagatgtagtttcattgctttttaaagtgtcatttctgatgacaggtagatgacctatttgtttccacgtatgtaaattattttctccctccctttagctactttcaagatttactctttttttgcccagtgttttgactatggtatgtctacatttggttctgtatatttttattctgttctttgagtttcttaaacctgtaagttgatatatgctgacaattaggaaaacttttggtctttactttttcaaatagctttttctgtctcattttcttctctactctttctaggagtccaattatattagtgctagactggtcatatttttattatttttctcctttgtattagctgtattgggaaattgttcttgatctgtttttaagtgcactgatagttttttctgccatctttaatttactggtatgtgcataaaatgacacttttatataagatattctgtctctcagttctaaaatttgtcctattatccctttatcatttttacttctctgttgagattctccatatattctctcttatgaccatctattccttaaatccttgaatatgcttataatagcttattttaaatttctcatcttctaattccagcatgtgggccatttcaatgtcttaatccattgtttactttttttgttatgtgtcatattttcctggttctatgtctaggcaggttaaattatatgttagattatgtgtatgatattttgtagagataggctcttttattttcctttgaagagtgactcttttctaacattagtcttctttctgtagtcaaacaccaaactttcactcctgagctatatgcaatggttgaaatctctgctctgtactagcaatttagctgttgttttctgctggattctatggagtctctttttatgaatgtgaaatgtagcagccatcatatatctgaatgaagtttaagtgctgattttagatttttactctgtgacattctcctctgtgactttcagttgtgtgagatttcctcccatgtcattcaaatttcccaattcttcttttctgtcagcctggaactctgtactcttattcctcaagctagtaaaactcaccgctttactcttagacatctaattttgcacagacttggaagtgtcatcaggtgtgaagttacattgatgcaaatttaaatcattgcaattttctttattcaatggtcaaatacttcatcagtggttgaatattctactatttctgcctgttttctgtttctcattaccatcaaatgtgtatttaattttttttagagttaatagtttttttccctgcatttgagttagacctgagctactaccacattttgtaattcaaactttttgtctaacaatgttttaaaaaactctttatttggagggaattctcaaatttctaaatactctacaaacattaggatcagggctcacattcccagtttcccttgtagccagatgtgcatatcgaacatggcctcagctaatgaagcatacccacatatttgaaagtaagaaaagtgttaagaggaactgtagatatcattttagttgatgtaaggatggaaaataaataaccaactttcactggtgaactttgtcttcaatcattgttttcccgtgggtaagcagctaattttctggcctagaggtgaaattggtgtgttggtaagaattgatttaatgataacctgcttttgtctttttaaaaattgtgaatccaccattgtttctggtcctgttttatacttatgcagtgtataatctctcatgcaaaatttagttctttgtttctcagcttaaactggattttgatgagcagttttcaccttcaaatgaaagaaatggctttggttgatgttagacaaaaataacaagaaggaattaaagaaatttgtttgtcatcttgtaacattaaataaatgaaactgaaaattcaacaattctgtttcataaaaaagtagaaagtttctactgtttttcattattttcaaagctatatcattaaatgaaatttctgcctcatggaaggtttttagaactatgtaataataccatacagaccattaggagagaaatgaataaagactgaaagaagtaagcactgtgtggtaacatagatggtgcacagttgtgtgtgtggagccctaatacatttgaccatggaatttatacaataaatgtcagtttcctgtgaacctgctaattaatatgactttcgcagacctttccttaacctaaactgtttaggtttcctgtcgacagactgcatgtattctcacctttaacctttccataatcttccctaattacagatgtcattggttcttaatagcaaaagaacagcagtagcttataaagttatattatttgttttttactaatatgtgaagtgattttgtctttcatttcacctctagagctaattatgtcttctaggttaacaaaaattccagatcataccatcattagtttaaactttacaatgaaatcattatttccatttattactagcctgcattatagcaatgtttagctaatgaattctcaaaatatttcttgaaaggtgaaagagtacctcaagtaaatgatgtaattaatttatttatcagaattttaaattaagtgttctgtttaatctcaaaggggtaccaatgaagtcagggcataaggactctggttaataaaacggtaagaattaaaaaagattattacatttttcctcatactatgatggctataatttttaaaacagtagaaatgtttaatttttaaaggctactagtgtctatttcattcaaagatgtgagctcttcagttcaacttgttgtttgaaatttgaacagctttttcttgcttttgttcaatacagttatttaacagtccaggcaggcctccggagttacatatatgtatgtggctatgtgtgtatatatacatagaagtacaaatagcatataaacaatttacataagacttttgcttttgatgaaaattcttctaaaagtgaatataaattaatagcatatggagcctacaaaaattgtccaatagggaactaggaaaagataatttgtgaagaaaaagtttgctaaaacagactttttatttttacatgtaataactttatattgaagggtttccagaaatataaaatgttatagggcacttatcctgagacacatgaaggagacaagggatagagctaggatggaagtgaaaataaaggacaaatagagatagatacttaagtggaaatgaaacactgcatgttctcactcataggtgggaattgaacaatgagaacacatacacacaggaaggggaacatcacacaccagggcctgttgtggggtggggagagggggtagggatagtattaggagatatacctaatgctaaatgataagttaatgggtgcagcacaccaacatggcacatgtatacatatgtaattaaattgcacgttgtgcacatgtgccctaaaacttaaagtataaaaaaaaaatcatcaaacaggaggtaatttcaaaacatggcttttccaggcagcaaattttctgaatgtatcgcaaaagaagataaattgcatgtctatgtagatcatgtcaatgaaataaacaataaagttacttattggaatattgaaagtggttgataataaataaattatttatatttatggtaaaagcaataaacttgatttttagggggttcaatgacttcctgaaaatatcctctcacagattttctcagagtgtctagttggcaaaagcacagctccaaatagctatttctgtcaacgtctacagaacatttacagtttgatttctaaaagtttccatttctactgaccttacaaatttgtaaagtgaatgcccaccaggacaaaatattaagtgataaaattaattggatcctacaagtgcaaatctaggcaaggaaaatcttcttccttcttaatgaatgatttttatgtctcttcattcttgtccttctaggtagagcaacactctggagaccttcttttgaggcatttcaccaccagagtaagtgtgatgtgtgagtaattagtccacccacagggagctggtgaaattaaattggaagttatttcctaactggcatatcttggagtaaaattaatctaataacagctttcataagagagcataagcttaaaagacaacatttttcattcaactttaccaaacaaagtgcaaatttaggtgtccagttgtgaagttttgttgtgtgtggattgtacagtgaaggtaccagtggacaacagttgctcatcaagcaagtttatacaaaagctttcggacaagtccaactctagataaaattctaaagtatttcatgcttgtgttcagagtttctttttctctctccaaggtaacccacatatcaaaagacatatgggttgtgggtagaacttcctaaaattgctggtgagaagtgtgccatgcataagcatacttcactagcttgaattttctgttagtctcacaggcaacaattacaatcctgtatgattttctatctccacacactcctgaatatagaaagaccaagtaacatccctggttaagatgtgtacaggttccaagacatgtctaaatatattcaccaagaggtttattattttcacagtggcattcactaaatcagttgtcagtgtagcattactcaaggaataagcagggtctttaatttatcaaagtttggagtgcaccccaagttggatcactgaagcacataactatagataagatcactcaaaagcacaaatccaggtaataaatattcactagtagtttatatgcatttagcaatttgaatgctgggaagtgtagcccagaaaatcaatcgacatggagctattaaagaggcattcatggcacctgcactttgaatctcttcagactcaggttaaacaggagacatgttagctcatgtatagtgcaaaaacccgtcctctttccctttttatctatgaacctgcccttttcaatgttatctagatgcctgaaggtatgaatacccttgatcttggtaaaaaatggtaccacccgtcagcaaaatctcactgatcagtgtctatgttacctcactgagttagccttttgtgttgttgtggcccagaatgacaatgttgacacaatccaaaccagtagttgggaagttaatgttggatgcgtctttgacaattgatggaatgacctgaaatcaaatgtgaggcagtggagacacaagaatgctattcaggaagttagtgatctgtggagatactaaatgaaatatctggaaggaaatgtaatcttgcaactatgcttttatgtgttttttgacataaacagtttctatttatggtggagctagagtgtccatttcccatgaagttcccatagtgttaactaatacagtcatgtgtcacttaatgacaggggtgtgtctgagaaatgcattgctggacgatattattattgtgtgaacatcacagagtttacttacacaaacctagatgctatagctgattacatatctaggttaggtggtatagcctattcctcctaggctacaaacctgtgcagcatgttattgtactgaatactgtaggcaattgtaacacaacagttaagtatatctatacttacttatatctatacagtaagtgtatctatacatgtctaaacatacaagaggtacagtaaaagtacagcgttatgattttattgcaccactgtcatacatgtgcactatccttgaccaaaatgttgttatgtgatgcatgattgtaacaaaagaattaattaaatataatattgaagtgcctattgagatttcaatgaagagaggaatatttgtaaattctgattaccttaagtgggaattgactttcttcctgtttccatggctgttcttgtgaaagagcatagctttccaaagacctgaaatctctgacaaatcttgcaattctctattgcctgcattatgaaagtcacctggtatcaaatgaggcaaaattgtagattataaagacctgtacttgtcagttcctaaacatagcaagccttggtctatcttgaacatttctgcagttataaatgagccttgggtcatgattttctgcctttttatcatagacaagatttaatttaggagatgtccttttaatgtgtaatgtgaatagtaagtgacacttatgaagcctattttcttccagccattttaattgtcaaatctgtccagtcaagatgcattgttagaggcttcactgacaacaccgtctgtgtgtgtggctgtgtgtgtgtgtatacatacacatggttgagcaggatttattgtaagtcaaaacagtctcaaatttctttggacaatacagcttccttggccattcccttggagctctgagttgaggagctggtgatgtgtatttctcttgcatgttctccacattatccctatgcaggtcttccatgggcttggttttggaaccagtgatgaggaagatcactagaattgttgttgtcaaaaagatgcctccattcttctgtataagcaatggcaattttccctgaccaatatttcttcttttgaaatggtaaattttgaatattaactgattaatataatcccataaaataacaaagtttgagccctatgatctgtattttaggctaaagttgtgttttatgctaaatcatcatttactccatgtatgatctttttttttttttttttttgagacagagtctcacactgtcactcaggctggagtgcagtggcacaattttggcttactgcaagctccgcctcccaggtgcacaccatcctcctgcttcagcctcctgagtagctgggactacaggtgcccaccaccacacccagctaattgttttttaagattaagggcgaaataaaagctgctctcctatattacattcataaatcagaattattaaagcaagctatttatttattacaaacacatactccaaatttagcatctaagacatgacagtctttcaagagacatcaatttactttttagggtctatagctatatttgtattcatgttattggtgtccataatatttcattagatgttctgggtaaattgataaatgaaaataacgtatgtgataaggagaacaacctaggtctcctggagggccccttacaactcagctggtgttagcagaaatgcctgggtgtaacagtgagaaacaacctttcaaaagtattgagcaatttttcaggcagaggaatatgtatgccaatccaggcagccagataagtggaggtcagttaaaagatcagtgtgtgattacattttttttttaaggtttctactgagaggaaatataactctcagttattattttctctgcatatctctggttattttgtcacaactttttatgtaagctactaccaaacactgggttatccaagatctatgggtcgtattcaatatttgcttttccctcaactactaacacgtttgattccctttgtaactttctcccctatttctcctttgaacctgttttccccaaccacactgagttaataagcctcctatatactctcataccctgttttatctaaagagatttcctttttctactattatacccatctcattccttaattttttcttcttatttctctctctattttttactcttttaggcacagctcatgtctcatgactttcaaaaagtttttcttctgatattcccagctcgaattaggtatatcccaatcagtttccttagaattacaagtctgcatattattggcttgcaatctgtcttaggctgggaattggctccttgtaggcagggactagaatttatttcctcttatgtccataatgcctgacacaggaactattctcacatacaaattgtagggccataattcctgagaacatatgtatattttagtgactcataaaggcttgaaatacatttttaaaatgattaattgggaagtccatgaacttgacatcttgatgtagaagaaaagcaagggcagatgaagaagttatacacgatacttgaaataccagaagaatataatcagagagcaataaattaatcctagatttttagatgtgaagaagttctgagaaatatttgaagacttggctctagggatgagtacataacagagaccagtagccagactcagagctttaaagagtgaagaaatggcattgcagggggaaggactgttgtatactaaatagaaattgtcattaaatggaagactaagcaagaggctgatgatctgtggatgagagaccaaaatggtgtggagatagaggtaaatgccataatctacaaagaagatatttttgtgccagaacgaaatgataggtctagaatgtaataaaagataaatagttaactacattgtaatgtggtctgagaactcactgaaggcatagccattgatattaacttccactttgcttccagacaaaagattttaaatatcttaaaaattacatttgatattgtatgattcatcaagacaaagtaaagctgtagttgccctgggggggtggggaatggggagtcacttttaatgggtacaggatttcaattttaaaagacaaaaagaattatggagatgggtggtggtgatgcttgcacaacattgtgaatacatttaatgacaccgaattgtataattaacagtggttaagatgcaaattgttgagtgtgttttgccacaattaaaaaacagaaaacaatagtatttgaagatatagcccatttcatctggtagctagctgtatgtgtctgctcagctgtggatagatatttatgctgtttctgaactggaggttactggtattctctaaggtataggaaaattgatcttatgtggctaactgaggtggatatagttgtatcagtcagacagtaatgatataatcatgagagtttacatttaacacaacttacatgtgttatactttagaaagcacttcatagatattattacttcataccattttccccttaccatatttgtctctcctttctctgctgacttcacaaaatgtctgttccacactactcagttcatctccttattttgtcaaaattttaagtatcagagtctccaaaaaaaaaattccagacaagtctcatcagctttcggtcattgattaatcgatgctcttagggggtttcccttccccttctcaatttaacatagcttcccaattcacttgccagtaaaacaacgttgtttatatggttttgtatttcttcctgctgaattatgaacattttttcatattgacattgatttccatctggccatgaaatactcaaggtgaagaaaatgaaacaaaattgttaatatttatcaagagccaggtactgttttcagtgtcctagaagcataaactagtgtaatgctcaccagctcatatgagaggcaaaaatggatgaaactataaaaccaagacacagagagttaagggaaatttcccaagatcacacagccactgaggctatgaactagattttgacttcaggctgtttaccccagaacctgtgctttcaaccgtcatttgtactgcttccctaaattacacttgagtacactgtgacatcaaatttcacctatgacactgattatctggggaactttgcaacttattctgaatatgactcagttttattttctgtacagaggtaaagtcagtatatactccatagatttgttataaggattatatgaaatgacacaagagaaggctttaaaaggacttggaaagcaataagcttttttgttttcaatcatttttcaataggttatcagtgttgtgaatggttcatgaaaaatgactttgggctcagtgagtaactgaaatgttgttgtttaatagtgtgtttaatattaatataatagtaacaaatgttgttattgttgagtaatagttatttggcttttcgctgcttttcttttctagtgttttagtcagagacttcttaagtctcctcaagtgtgtacacatttcttaaatttgttggaaagtaccaaatttaagatatcttgcattttttttcttccttagtaaacactaaattccatcacacagcagaaaaagggctctgttattgtcggtacaatggtttaatattcacttttattccctatatcatagttctgatttaattactatttagaataaaacttgttccttattatatgcattcataattataaaatttgtgttttaatgccttctacaaatatactgtgcttttctttatttccttatatcttttactgttgcatgatcctggtatttgaaatctcattaagtgttgtttggggatttgctgggaatgtcatctacatagtaatgtctcaagtttgtagcatctttaaaacataataggagacggaattcacagcagagtaataagcctcccactttaggcaatatatttgtgattgacatgactttgttcccagagggcagttagcaacacaatattatggctatgtgtacaaggaaaacaaattttaaaaatctcctttaaaaaaaacagttcccaatcctaaccagtatcatgcacagaatccgtttccacctcttcatatggaagcagctctgggtggacatctagaaagttggataactatttatcacatatgatctgcaaagggagagatttacaagaaagtattaaatttgatccataggaaagcaaaatcaaaaatcaatgaattttccatttgtagttttccctaggggctctactctcaagatggcttaaatgcattagaattcaatgactaggcacaattgtttgttagtgacataaaagcaaggtaagcatttctgctttatgagtccaagcacagggacacttggttttatttggaaggatatcataaaggcaatgtttatgagtaatccctcattgtcttttcttctgtaacattcaatgctatgtactaaaatttagaaatgaaaactacttaaagaccacctgctaagtttcatgtatttcaaattctcagatcctgagtgtttaaatatgtctgtatttcttcatgaaaaaaacataatctttgccaagttagaaaaagaaaaactcatattcccatttttaactaaaggtaatcagaaatttggacagtttttagccttcaatacattatgtaatttgggtaacaggctgaataaaagtaaggaacttcagttaaattcagagagaagctagtaattatttctaagactcaaatgtatagaacagatctctgatattaaggataagaccctcaaaggtgacacaaaatgggtaattgtgggattattttaggaggaatcatcatatattcttactgctataaatacagtcaaatgtcagataaatatactccactgaaatgttttctaggaatgatgttggaaccaatgttgataattttgaaagtcatggagaggatttcagatgatagaagtcgggcaaatatcccaggtttaataaataagcaaatggtgagttccaaagctgctgtatcagtgagcctcatattgatcctgagcacaatttcagaaaggtccattaaatgggtctttggagagcacttaggataagaggctggcagcaaagattcactaagaacaatggtgccaagcttgcctctttgacattgttatctgactgataaaggtaggctatagcggtacacaatacagatatttccagggtaaagctgttgagctgctgtaattttccttgcctcttcactatcttctcctatagttgactcccaaggaaaagatagttgacttttaatctagaaatgtatgttaattggcaaaaacaaaaaaatgaaaccataaaatatcctttaggcttctctctgctcagttattagatcatatgaatgtgcccttaggaaacacagaaggcccacactattatagagacaaatttcttacattttctgctgtttaatgctcttcaaaagacttaccatacttcactaatttgattaccaactacttgaacacagggaccaatgtgtttattaaaaattttgcatattatgagggcattaacttttaattattcaattgttaagacaatgcatattattataaaccatagaaggcacacttattacctccttaagaaccagtctctatttctctggttcatagatctccaagtttatagagggattggacatttgtgtcttcaattggccctcttcagccctaggataaatagtgattaatctaagccaatagttttcggctctgtctgacccaatgcctctacttcataagaaattcttcaaagaccccttcgctattctaaattattagtgagaacacaatgtatgcattcaagttgttgaaaatattaatgttatgctgaagctaacaaaggagaaataatttactgtcaatatataatccaaaatgtatataattgtgccagaacatttacatatcaaatacaatagaacataatgaaattttcatatcttcgcccataccttgaaacattgtaaataaaaagttacaaatatagtttcattgaataaccaaatgccaaaactgccatttctattgttgacatgattgaactgcattggtaaatgtaatagatactttctgtttggcccttgtcccctgttatactcccctgtttactggcttttgtccaagtggaatggtccatattgaatatctccatcggttcccttgttcattgccttctatgcatgttcatgagattaaagggaaggaggaaatgggattgggggttattgcctaaactccctctctgctaggtctcctggaccaatctttttcataagaaaattagtgggccgggcgcggtggctcacgcctgtaatcccagcactttgggaggccgaggcgggtggatcatgaggtcaggagatcgagaccatcctggctaacaaggtgaaaccccgtctctactaaaaatacaaaaaaaattagccgggcgcggtggcgggcgcctgtagtcccagctactcaggaggctgaggcaggagaatggcgtgaacccgggaagcggagcttgcagtgagccgagattgcgccactgcagtccgcagtcccgcctgggcgacagaacgagactccgtctcaaaaaaaaaaaaaaaaaaaaaaaagaaaattagtgtttccttctgtgatcagggcagtttactccccagaactctgcctgccactgctaaaccagagttattgtggggtgtgatttctgtgattccttcacccttctcccctgacattttcgtaagtagtctctttggaaataaacccaagttaaattatcttagttggtgtgttttctatttttcctattgagactctgaaatgagtatctaaatgaaaaaatctaccatcttttctcatatacatagtagtttcattcttgcaaaattcatggcatattaaaaccatgcaaaagtacttggcacttaggcagttacatttgggattgtataattaaacaaagcaggttattcaccttcattacattagaaagtcattcaggacatacagcaatccttaattaggagcggctatcccatgttactggacatatggtatccctgttttccaatccttaaagtttttccttaaagttccaaaatgccgtcacttattatttcctgccattgaattttgtcacatgaagttgtaaggctgggaatgccatagccatcttgaaaacataggtagaaagataagataatcacaaagaagtggatcatgttgaattaactaagcattgataccatctatttgttgtgcgatttggtcaaagttgctccttgtttttttcttcaattagttgactattctgttacttgaagctaaaaacatttttttcttttctttctttcttttttatttttgacagaaccttactctgttgcccaggctggagtgcaatggcatgatcttggctcactgcaacctctgcttgcctagttcaagcaattctcacacctcagcctccctagtagctgggattacaggcacatgccaccacactcagataatttttgtatttttagtagagatggggtttcaccctgtttgccaggctggtctcaaactcctgacctcaagtgatctgcccacctcagcctaccaaagtgctgggattacaggtgtaagccactgaccctgcccaaaaacattttaaccaatagcaaagcacattatttcattatattttttcaaaagttgccagtaatttcaattaaaaatattatataacatgtttaatgcaatacaaatgcttttcaatgtacaatggggttaagtcttgataagctgattataaattgaaaatacagtaagttaaaaatgtatttaatatctaacttactgaatatcacagcttagcctggcatacctttaatgtgctcagaacacttacatcagctgacaattgggcaaaatcgttgaatacaaaacctgctttataataaagtattggatattttatgtaatttgttgaatattgtactgaaagtgaaaagcagaatggttatattctattcaaagctatcacttttgcttcatcataaagtaaaaaaaatcataaattgaaccattatcagttgttgaccatctgtgtatatgtatgtgtgtgtgtacctatataaacatgtatgtttatatatatatttgtgtgtgtatataacctcggtgtgtgtgtatgtgtgtttgagagtgtgtgtgtgtgtgtgtgtgtgtgtgtgtgtatgaaattgtagggaagtaaaatttcttatcttatagatatagcatgttaacatgttggtacctatcctcctgagatgtaaaattttacatggatagatatgtacatttacagttgtacacaaagagaaacatattctgtagcctctttgtttttctgcagtttcattcaacactatctggtttatatgggtgattacatatataatgctaggattaaggttcttctctataactttgaaacttccttgattatcaacccttggtatattcttagaataggattttattttagaattaagatccttgtttcaggactctagactgttaacacacagagccaataattattcagaatggttgggttagttcacattcccacagaggagacatcaaatgtccaggctgcacagcctcattaacactagattttctggacattttatatagtatttcatctgatataaaaagtagaattctaatttgattatggttgttaatttatttttacatttttagtcattatgaaaatgttttactatatgaaaagccaggaaagggttttttttttaaggtagtacttcagaaatatttatgatacttaatttttaaaaattaactctaaaagaatcttgaaatgtctgtttaataaaataggacataaatactggtcacattagtgaaaaatatttgtttaaaattaaaatatctgcagcaatcctgtagatattaataagtttttaaagaatgacatcttcaaaatataactgttctaaactaatatgtctccattaatacatatagatacatatatctaaataaatttgaagacttcaaattccaggtacaatataatttttttctatcctttgatttgtcattcaggattttgtaatttgaacagaaatattttgccctaaccacatgtctgtcttttctcttactaaaaatattattttatgtaaaattgttttaaaggtcagttagcacgtttgaaaagcatcttgtacaatgttacataatatattgcatatttggttacattgttttaactgtgtaaatatggtttaaatctgtgatgctctttagtgctgatcatgatgcaaatcaaatttatctgtataaaaggctcctgttaattttttttattatactttaagttttagggtacatgtgcacaacgtgcaggtttgctacatatgtacacatgtgccatgttggtgtgctgcacccattaactcctcatttaacattaggtatatctcctaatgctatccctaccccctccacccaccccacaacagtccccggtgtgtgatgttccccttcctgtatccatgtttcctcattgttcaattcccacctatgagtgagaacatgtggtgtttgattttttgtccttgtgatagtttgctgagaatgatggtttccagcttcatccatgtccctacaaaggacatgaactcatcattttttatggctgcatggtattccatggtgtatatgtgtcacattttcttaatccagtctatcattgttggacatttgggttggttccaagtctttgctattgtgaatactgccacaataaacatacgtgtgcatgtgtctttagagcagcatgatttataatcctttgggtatatacccagtaatgggatggctgggtcaaatggtatttctagttctagatccctgaggaatcaccacactgacttccacaatggttgaactagtttacagtcccatcaacagtataaaatgttcctatttctccacatcctctccagcacctgttgtttcctgacttttttatgatcgccattctaactggtgtgagatggtatctcattgtggttttgatttgcatttctctgatggccagtgatgatgagcattttttcatgtgtcttttggctgcataaatgtcttcttttgagaagtgtctgttcatttcctttgcccacattttgatggggttgtttgttttcttcttgtgaatttgtttgagttcattgtagattctggatattagccatttgtcagatgagtaggttgcaaaacttttctcccatactgtaggatgtctattcactctgatggtagtttcttttgctgtgcagaagctccttagtttaattagatcccatttgtcaattttgtcttttgttgccattgcttttggtgttttagacatggagtccttgcccatgcctatgtcctgaatggtattgcctaggttttcttctagggtttttatggttttaggtctaacatgtaagtctttaatccatcttgaattaatttttgtataaggtgtaaggaagggatccagtttcaactttctacatatggctagccagttttcccagtaccatttattaaatagggaatcctttccctatttcttgtttttgtcaggtttgtcaaagatcagatagttgtagatatgcggcattatttctgagggctctgtcctgttccattggtctatatctctgttttggtactaataccatgctgttttggttactgtagccttgtagtatagtttgaagtcaggtagcatgatgcctccagctttgttcttttgccttaggattgacttggcaatgcaggctcttttttggttccatatgaactttaaagtaatttttttccaattctgttaagaaagtctttggtagtttgatggagatggcattgaatctttaaattaccttgggcagtatggccattttcacgatattgattcttcctacccatgagcatggaatgttcttccatttgtttgtatccttttttatttcattgagcagtgatttgcagttctccttgaagaggtccttcacatcccttgtaagtggtattcctaggtattttattctctttgaagcaattgttaatgggagttcactcatgatttggctctctgtttgtctgttattggggtataagaatgcttgtgatttttgcacattgattttgtatcctgagactttgctgaagttgcttatcagcttaacgagattttgggctgagacgatggggttttccacattcacaatcatgtcatctgaaaacagggacaatttgacttcctcttttcctaattgaatgccctttatttccttctccttcctgattgccctggccagaacttccaacactatgttgaataggagtggtgagagagggcatccctgttttgtgccagttttcaaagggaatgcttccagtttttgccattcagtatgatattggctgtgggtttgtcatagatagctcttattattttgagatacgtcctatcaatccctaatttattgacagtttttagcatgaagatttgctgaattttgtcaaaggccttttgtgcatctattgagataatcatgtggtttttgtctttggtcctgtttatatgctggattacgtttactgattttcatatgttgaaccagcctttcatcccagggatgaaacccgcttgatcatggtggataagctttttgatgtgttgtaggattctgtttgccagtattttattgaggatttttgcatcactgttcatcaaggatattggtctaaaattctctttttttttttgtctctgccaggctttggtatcaggatgatactggcctcataaaatgagttagggaggattccctctttttctattgattggaaaagtttcagaaggaatggtaccagctcctccttgtgccactggtagaatttggctgtgaatccatctggtcctggactttttttggttggtaagctattaattattgcctcaatttcagagcctgttattggtctattcagagattctacttcctggtttagtcttgggaggatgtatgtgtcgaggaatttatccatttcttctagattttctagtttatttgtgtagaggtgtttatagtattctctgatggtagtgtgtatttctgtgggattggtggtgatatcccctttgtcaatttttattgcatctatttgattcttctctcttttcttctttattagtcttgctagtggtctatcaattttgttgatcttttcaaaaaaccagctcctggattcattgattttttgaagggttttttgtgtctctatttccttcagttctgctctgatctaagttacttcttgccttctgttatcttttgaatgtgtttgttcttgcttctctagttcttttaattgtgatgttaggatgtcaattttagttctttcatgctttctcttgtgggcatttagtgctataaatttccctccacacactgctttgaatgtgtcccagagatactggtatgttgtgtctttgttcttgttggtttcaaataacatctttatttctgccttcatttccttatgtacccagtagtcattcaggagcaggttgttcagtttccatgtagttgagtggtcttgagtgagtttttaaatcctgagttgtagtttgattgcactgtgttccgagagacagtttgttatactttctgttcttttacatttgctaaggagtgctttacttccaactatgtgctcaattttggaataggtgtggtgtggtgctgaaaagaatacatattctgttgatttggggtacagagttctgtagatgtctattaggtctgcttagtgcagagctgagttcaattcctgtatatccttgttaactttctgtctcgttgatctgtctaatgttgacagtggggtgttaaagtctcccattattattgtgtgggagtctaaatcactttgtaggtcactaaggacttgctttatgaatctgggtgcttctgtattgtgtgcatatatatttaggatagttagttcttgttgaattgatccctttaccattatgtaatggccttctttgtctcttttgatctttgttggtttaaagtctgttttatccgagactaggattgcaacccctgcctttttttgttttccatttgcttggtagatcttcctccatccctttattttgagcctatgtgtgtctctgcacgtgagatgggtttcctggatacagcacactgatgggtcttgactctttatccaatttgccagtctgcaccttttaattggagcatttaacccatttacatttaaggttagtattgttatgtgtgaacttgatcctgtcattatgacgttagctggttattttcctcgttagtttatgcagtttcttcctagccttgatggtctttacaatttggcatggttttacagtggctggtaccagttgttcctttccatgtttagtgcttccttcaggagatcttttagggcaggcctggtggtgacaaaatctctcagcatttgcttgtctgtggagcatattatttctccctcacttatgaaggttagtttggctggatatgaaattctgggttgaaaattctttcctttaagaatgttgaatattggcccctactctcttctggcttgtagagtttctgcagagagatcagcagttagtctgatgggcttccttttgtgggtaacccgacctttctctctggctgcctttaaaatcttttctttcatttcaactttggtgaatctgacaattatgtgtcttggaattgctcttctcgaggagtatctttgtggcattctctgtatttcctgaatgtgaatgttggcctgccttgctagattggggaagttctcctggataatatcctgcagagtgttttccaacttggttccattctccccgtcacattcaggtaaaccaaatagacgtagatttgttctattgacatagtcccatatttcttggaggctttgttcatttctttttattcttttttctctaaacttctcttcatgcttcatttcattcatttcatcttccatcgctgataccctttcttcccgttgatcacatcggttactgaggcttatgcatttgtcgtgtagttctcgtgccatggttttcagctccatcaggtcctttaaggacttctccacattggttattctagttatccattcgtctaatttttttttcaaagtttttaacttctttgccattggttcgaacttcctcctttagctcggagtactttgatcttctgaagtcttcctctctcaactcgtcaaagtcattctccgtccagctttgttccattgctgatgaggagttgcattcctttggaggaggataggcactctgatttttagagtttccagtttttctgctctttttttccccatctttgtggttttatctacctttggtccttgatgatggtgacatacagatggggttttggtgtggatgtcctttctgtttgttagttttccttctaacagtcaggatcctcagctgcaggtctgttggagtttactggaggtctcctccagacactatttgcctggggggtatcagcagtggtggctgcagaacagtggatattggtgaactgcaaatgctgctgcctgatcgttcctctggaggttttgtctcagaggggtacccggccatgtgaggtgtcagtctgtgcctactggggggtgcctccctgttaggctactcggggttcagggacccactaggtgggggttgtctgcccgttctcagatctcaagctgcgtgctgggagaaccactattctcttcaaagctgtcagacagggacatttaagtctgcagaggttattgctgtcttttgttggtctgtgccctgccccccgaggtggagcctacagaggcaggctgtcctccttgagctgtggtgggctccacccagttcgaacttcctggctgctttgtttacttactcaagcccgagcaatggcgggcgcccctcccccagcccaactgttaccttgcagtttgatctcagactgctgtgctagcaaacagcaaggctccgggggtgtaggaccctccaagccaggtgctggatataatctcctggtgtgccatttgataagcctgttggaaaagcgcaatattagggtgggagtgacctgattttccaggtgccatctgtcacccctttctttgactaggaaagggaattccctgacccattgtgcttcccaggtgaggtgatgccttgccctgctatggctcatgcatggtgcgctgcacccactgtccagcactccccagtgagatgaacctggtacctcagttggaaatgcagaaatcacccgtcttctgcatcactcacgctgggagctgtagactggggctgttcctattcggccatcttggctccaccctctaatttttaactttcaaaagattagatacatttaccctcttctgaattttaattcctgatggaaagattgttaaatctcaagaggataatgaatcagcttctgattatattctggaattgagatttgatcacacatccaagaatgcgtattcactttcctttacattacacacatgcataataccatgctgagtgatgctggaaaaagtgagtcttcagtaatgccctcatgaaattacagtctcactacactgaggtattttctttttaaccctttctttcttttctgttgtgaatatgtgccttctaagaggtgaacaacgggaaaaactgaaaaagaaccttcatctaattcagtaactagcttttgtatcttctaagaatttttatctccagaaagctctaattttcattcctttacaagctttatttctctctcctttccaacaccagactttgctctgtttgttttctatatcttttttagagatgcctacaatagaaaaaaactatgacatattcaatacatctgaaaagtttgcattaccatagataagaatgaattatctgtttataaagaaaaaataataaaaatatgaaccaagaaagcacagaaggtagtaaccacatttagatgtttatcatggaatcatctttataatccatctgttacaattccacacagcaaattacaagtaattgtgaagtttcccctcattttataggtttggtcttataaggcatacaacacaaattttaattacttttcattttggtatttggatcttaatttggtcaagtggccactgggtagatgatggagactcttgagacatgcagtcttcttctagctttgttgatgtgaatattactgtgtatttttcattcacttattattttacaaggcatgcttcattaaaaatatatcagcatctcattgacaaatcacaaaatttaaaaggcaccagaaaaaaacaatttatttaaaacattcctgtgtaaaagtagtcaccactcttactattcttcaaatatttttgttatatttaaacgcaagcctaattttatctcgagtgtctgaccttgatgatattgtacactttaaacttagaaaaattgaactctattggaaatttcctacagatcagcttttctagatgccaagcgccttgtttcagccatggtgatgacagcaaattgggttctcagggattctggcctctggcatcatctcagttgtttataattgaagttgggtctgatgagaatgcagcttagatgcatggtgggactgctgggcttaaggctggcctgccaggaggttgcattgaggtgtaactaggcaaagaaagaaagagtttattgaggcactactgacaatagcaaagacttggaaccaacacaaatatccaacaatgatagactggattaagaaaatgtggcacataaacaccatggaatactatgcagccataaaaatgatgagttcatgtcctttgtagggacatggatgaagctggaaaccatcattctcagcaaactatcacaaggacaaaaaaacaccgcatgttctcactcataggtgggaattaaacaatgagaacacatggacacaggaagaggaacagcacacactggggcctgttgtggggtgaggggctaggggagggaaagcattaggatatatacctaatgtaaatgacgagttaatgggtgcagcacaccaacatgtcacatgtatacatctgaaacaaacctgcacgttgtgcacatgtaccctagaacttaaagtataacaaaaaaaagaaggggttgggcaaaattaccaacaatcttcaactatgaatttgtatgagtaggggcttcccacaccatcaggcactccaagttggagaaacaagggatgttgaattgaaagtttaattttttaggcttgatagtcagattagggaagttttgggtacacctttcccactctagagccctctccctaactcagggccaatttggggcatgggctcagtggaaaagagtgccaagatcaattagaaatatccatcatgaacataggaggcaggcattctggccaagggggtgcgtcttcccactttgtaatccagagtgcgatttcttcttgctatctgtccctccataaataagcgttgggtgaaggacaagctagttaccattgaggatggaatgaaattctaccagaattgcaaaatgaactgagagccacgaaagtgttcctctgtgaaccagcagagagatctgtggaaggcaaaggaagaggagccaagaggccagataacattcctgcttcccctacattgtgagaatgaaattgtcagcaacctatatcagtaattaaccagaggctttttagagagtaagacttctgatagatacctcaatagctgaagttgctcttcagtactgcatataacctgtggacagattttcatcattattaattcatttattcaacacatagatattaaattcaaggcatagttctaaactatgcagtcaattccaaaaaaataataatgaaggacattagctctgcctcataggacgttaaaactctagctgctaaatgagacaaatagggttcccacatcaagtgcctgggctcctgttataaactggactctgcttccattggcttctcttgtttctgttttgataaacccatcatttggcttagtccctacccttgccatgctcacccaccagtaggtggacctccttgaccataactacagacatagatctttgattgtttcttttcaaatgtttgcttactttagaggtgcagtcaaatgttgtttggaccataagactctgaggctgtgtgtggttgaaactgtcttgagactcaaagagctattgaggaagggatttgatagctgaactcttttgaagattttctctgtctctcacacatctggggctgaatagcttaacgtttaatttctacatcgacgatagtttaatagccattcatgcaaatcagttctgctgtgagttattatcctactccaataccaactaacgcattccttaaatttagtgtacgtataaattctacatggtaagtgaagctgtctttatgaatggctgctatagaatatactagattgtgtaggttttagtacaatccaggtaattatcaagcctttgtaatattttcaggaaagtgatcctttcacttcagtttatggaacttgaaaattttttagttgccaccgactagttagatcataaacttaattctatgtatctgaatttatttttctatttataaatttatctgggtgctttctcaaaggtttcccagattaaaaacctatggctttgtaaaattaaaacagaagtaataggaattgagttaaaaaacagaatcaggccaagcctggtggcttatgcctctaatgccaacacttagggatgccaaggggggaggatcatttgaggtcaggagttcaagaccagcctggacaacatggcaaaaccccacatgtattaaaaaaatacacaaattagctgggcgtggtggtgaatgcctttagtcctagctactcaggaggctaaggcaggagaatagcttgaacttgggaggctgaggttgcagtgagccaagatagagccactgaattccagcctgggtgacagagtgagatcctgtcttaaaaaaaaggaaaaaagaaaaagaaaaaacagaatcatacaatgagagagattgtatagcccttttaattgtccataatggatacatttctttttctgtgtaatagtttatcagcatgaaaaaaaagagtcactgaacactgataattttctttctctctctctctctctttttttcctttttttggagatgaagtctcgctctgttgcccaggctggagtgcaatggcaacatctctgttcactgcaaccttcacatcctaggttcaggagattttcctgcctcagcctcccaagtagctgggattccaggtgcaccccgtcatgcctggataaatttttgtattttcagtagagacggggtttcatcatgttggccaggctggtctcaaactcctgacctcaaatgatctgcccgccttagcctcccaaattactggtgatgattttcatttaatggtgttctacaaagtgagtttaggcagtgaaagggcacaagtcacctatagtttaccagaaagtagtaccagtcaccagcgttgaagcatactcctaaccctggaaaatttcttcagcagccagaattaatctcagattttgagactggagcaaagactaatttggtatgtgttcatttagattagtaaatctctatggtgttcgaactgtataatatcaaatctaaaataagtcaagagagttagacaatatctcatctctgagaaaataaatgcattattttcaagagatttaagactgaatttaaaatccaactgcctgttccagtgtatgtttctctagaatatggccaagccctacaaattctggatagtgtcctccaagttgtgtttaagtgataattgataaatctatggtttagatacatatggaattccacataactctagctccagcctttgcgagtaaaaattggcagtgatcatggccttaatggaggcatgtggttaattggaattttcagtaccaaaagtcttcttcttactagtttatcagggtaccctataatagtatccataactcattgcccacttgtctgttttgatttcttttttaaaaatacaattttaaacttagaggttttgtacctcaagtcacatatgtggcacatttataaaataatcatgcctttgcatatttttcctttgatatcttagctgtatatacaagccacttatgttttttaattgccacaaatattgcactgaaatagagcactagttgcaaaaatgcctggtataacatttcttcttgttcttgaaagtaattttaataccccatgtttaagatattcctagacaactataagtaactataattatttctgctaggtagaagcatctttgtggtcaacatttgtgaagtgccttgtaaataaaaatatgcttgagtagaaatagtattttgcaaatatagccctaaatagagctactgattttaccaagaattaaagactccaaactctgtctttgtctttcaaatttggtttataggaacatctcattacaatgagcaaaaagcctatctgatcattaaagagataattttgacactttcaaatgacacagctaatttgtagtaggtttttgaagtgcaaattacatgtttctgtttaaataatgacagtaaaatatggacagtatctattcacactctatatacacaactacaacttgtccctagaagaaaagtttaatttttcaggtctcatccacaaaacgaagtgttaataagctgtatctttattctcacttttaagtaatttcttcttaaccattgtataacactaccacagtttgtatggagataaaataactcatggtgagaaatccagttctttaaaaaatcattttaccttcaatcacttttaggatgtctatggttttagagtaaggacgaaaatttataaacatttgttaaattatgcaactgtgtttgaagatgtttcaaaattacattttccttattttacaactagttttcatgtattcacaaacgagacacatgagaattattaatgcaaaagcacagcatatcaacaaagtttataatgtaaatagtttagttaggaaagaatgtaatgagtgaattatcaaagctattttattggttcctagatttaccatagaagaaaataaagcagccttttaaaaatttctcagcactgagtccatttaaggtctgtattgtatgccgtaagttctaaaaaatgttattgccggtaaaaataggatgcctatctaaaattgtctttttaaaggttctctcttattcttcttcccttcctatgtgtgcacagaatactgtcatcgtcttgattggaacactatctctctttctcagagggtgtacatttgtagaagggagaaaatatttgttaattttgcttcctgtaagataaggcctcaatggttaaaggttagttaacaaactttttttttgtcttcatactattatcttggaattaccaactggcttctacttggattttgaataatgaaagaaaagaactagcatttgttagaacttactgtgttccagaaactttattgatgccatttcttctcattatcacattcattctttcaattagtataatttttttccatcttaatgaggtgggaccagaggttttgtaatatccactaacccactgtggatttcatggattgcaagaggaagaaagcatggtggaactcaggtttctctgattccaaattcacatcctttcatgtctccatgaaaaatagaaaagataaattgggctctattctaacaagagaaacacaattttccgtcagttaaatgaataattcttttttattttattttattttatttttattattatactttaagttttagggtacatgtgcacattgtgcagattagttacatatgtacacatgtgccatgctggtgcgctgcacccagatacctaaatgaataattcttaaacctcaaaaataaaaagtagcaaaacctcaattcaagagtagacataaaggttgtgacatgggtggcagggacatatgtctagtgacagatttcctatgcatatctgaccaaaaatccccctcatgattttcaaatcagatgcttaactacatttaatgagtttcccgaatcattaatatcaggctctgaaaacaggatcnnnnnnnnnnnnnnnnnnnnnnnnnnnnnnnnnnnnnnnnnnnnnnnnnnnnnnnnnnnnnnnnnnnnnnnnnnnnnnnnnnnnnnnnnnnnnnnnnnnnnnnnnnnnnnnnnnnnnnnnnnnnnnnnnnnnnnnnnnnnnnnnnnnnnnnnnnnnnnnnnnnnnnnnnnnnnnnnnnnnnnnnnnnnnnnnnnnnnnnnnnnnnnnnnnnnnnnnnnnnnnnnnnnnnnnnnnnnnnnnnnnnnnnnnnnnnnnnnnnnnnnnnnnnnnnnnnnnnnnnnnnnnnnnnnnnnnnnnnnnnnnnnnnnnnnnnnnnnnnnnnnnnnnnnnnnnnnnnnnnnnnnnnnnnnnnnnnnnnnnnnnnnnnnnnnnnnnnnnnnnnnnnnnnnnnnnnnnnnnnnnnnnnnnnnnnnnnnnnnnnnnnnnnnnnnnnnnnnnnnnnnnnnnnnnnnnnnnnnnnnnnnnnnnnnnnnnnnnnnnnnnnnnnnnnnnnnnnnnnnnnnnnnnnnnnnnnnnnnnnnnnnnnnnnnnnnnnnnnnnnnnnnnnnnnnnnnnnnnnnnnnnnnnnnnnnnnnnnnnnnnnnnnnnnnnnnnnnnnnnnnnnnnnnnnnnnnnnnnnnnnnnnnnnnnnnnnnnnnnnnnnnnnnnnnnnnnnnnnnnnnnnnnnnnnnnnnnnnnnnnnnnnnnnnnnnnnnnnnnnnnnnnnnnnnnnnnnnnnnnnnnnnnnnnnnnnnnnnnnnnnnnnnnnnnnnnnnnnnnnnnnnnnnnnnnnnnnnnnnnnnnnnnnnnnnnnnnnnnnnnnnnnnnnnnnnnnnnnnnnnnnnnnnnnnnnnnnnnnnnnnnnnnnnnnnnnnnnnnnnnnnnnnnnnnnnnnnnnnnnnnnnnnnnnnnnnnnnnnnnnnnnnnnnnnnnnnnnnnnnnnnnnnnnnnnnnnnnnnnnnnnnnnnnnnnnnnnnnnnnnnnnnnnnnnnnnnnnnnnnnnnnnnnnnnnnnnnnnnnnnnnnnnnnnnnnnnnnnnnnnnnnnnnnnnnnnnnnnnnnnnnnnnnnnnnnnnnnnnnnnnnnnnnnnnnnnnnnnnnnnnnnnnnnnnnnnnnnnnnnnnnnnnnnnnnnnnnnnnnnnnnnnnnnnnnnnnnnnnnnnnnnnnnnnnnnnnnnnnnnnnnnnnnnnnnnnnnnnnnnnnnnnnnnnnnnnnnnnnnnnnnnnnnnnnnnnnnnnnnnnnnnnnnnnnnnnnnnnnnnnnnnnnnnnnnnnnnnnnnnnnnnnnnnnnnnnnnnnnnnnnnnnnnnnnnnnnnnnnnnnnnnnnnnnnnnnnnnnnnnnnnnnnnnnnnnnnnnnnnnnnnnnnnnnnnnnnnnnnnnnnnnnnnnnnnnnnnnnnnnnnnnnnnnnnnnnnnnnnnnnnnnnnnnnnnnnnnnnnnnnnnnnnnnnnnnnnnnnnnnnnnnnnnnnnnnnnnnnnnnnnnnnnnnnnnnnnnnnnnnnnnnnnnnnnnnnnnnnnnnnnnnnnnnnnnnnnnnnnnnnnnnnnnnnnnnnnnnnnnnnnnnnnnnnnnnnnnnnnnnnnnnnnnnnnnnnnnnnnnnnnnnnnnnnnnnnnnnnnnnnnnnnnnnnnnnnnnnnnnnnnnnnnnnnnnnnnnnnnnnnnnnnnnnnnnnnnnnnnnnnnnnnnnnnnnnnnnnnnnnnnnnnnnnnnnnnnnnnnnnnnnnnnnnnnnnnnnnnnnnnnnnnnnnnnnnnnnnnnnnnnnnnnnnnnnnnnnnnnnnnnnnnnnnnnnnnnnnnnnnnnnnnnnnnnnnnnnnnnnnnnnnnnnnnnnnnnnnnnnnnnnnnnnnnnnnnnnnnnnnnnnnnnnnnnnnnnnnnnnnnnnnnnnnnnnnnnnnnnnnnnnnnnnnnnnnnnnnnnnnnnnnnnnnnnnnnnnnnnnnnnnnnnnnnnnnnnnnnnnnnnnnnnnnnnnnnnnnnnnnnnnnnnnnnnnnnnnnnnnnnnnnnnnnnnnnnnnnnnnnnnnnnnnnnnnnnnnnnnnnnnnnnnnnnnnnnnnnnnnnnnnnnnnnnnnnnnnnnnnnnnnnnnnnnnnnnnnnnnnnnnnnnnnnnnnnnnnnnnnnnnnnnnnnnnnnnnnnnnnnnnnnnnnnnnnnnnnnnnnnnnnnnnnnnnnnnnnnnnnnnnnnnnnnnnnnnnnnnnnnnnnnnnnnnnnnnnnnnnnnnnnnnnnnnnnnnnnnnnnnnnnnnnnnnnnnnnnnnnnnnnnnnnnnnnnnnnnnnnnnnnnnnnnnnnnnnnnnnnnnnnnnnnnnnnnnnnnnnnnnnnnnnnnnnnnnnnnnnnnnnnnnnnnnnnnnnnnnnnnnnnnnnnnnnnnnnnnnnnnnnnnnnnnnnnnnnnnnnnnnnnnnnnnnnnnnnnnnnnnnnnnnnnnnnnnnnnnnnnnnnnnnnnnnnnnnnnnnnnnnnnnnnnnnnnnnnnnnnnnnnnnnnnnnnnnnnnnnnnnnnnnnnnnnnnnnnnnnnnnnnnnnnnnnnnnnnnnnnnnnnnnnnnnnnnnnnnnnnnnnnnnnnnnnnnnnnnnnnnnnnnnnnnnnnnnnnnnnnnnnnnnnnnnnnnnnnnnnnnnnnnnnnnnnnnnnnnnnnnnnnnnnnnnnnnnnnnnnnnnnnnnnnnnnnnnnnnnnnnnnnnnnnnnnnnnnnnnnnnnnnnnnnnnnnnnnnnnnnnnnnnnnnnnnnnnnnnnnnnnnnnnnnnnnnnnnnnnnnnnnnnnnnnnnnnnnnnnnnnnnnnnnnnnnnnnnnnnnnnnnnnnnnnnnnnnnnnnnnnnnnnnnnnnnnnnnnnnnnnnnnnnnnnnnnnnnnnnnnnnnnnnnnnnnnnnnnnnnnnnnnnnnnnnnnnnnnnnnnnnnnnnnnnnnnnnnnnnnnnnnnnnnnnnnnnnnnnnnnnnnnnnnnnnnnnnnnnnnnnnnnnnnnnnnnnnnnnnnnnnnnnnnnnnnnnnnnnnnnnnnnnnnnnnnnnnnnnnnnnnnnnnnnnnnnnnnnnnnnnnnnnnnnnnnnnnnnnnnnnnnnnnnnnnnnnnnnnnnnnnnnnnnnnnnnnnnnnnnnnnnnnnnnnnnnnnnnnnnnnnnnnnnnnnnnnnnnnnnnnnnnnnnnnnnnnnnnnnnnnnnnnnnnnnnnnnnnnnnnnnnnnnnnnnnnnnnnnnnnnnnnnnnnnnnnnnnnnnnnnnnnnnnnnnnnnnnnnnnnnnnnnnnnnnnnnnnnnnnnnnnnnnnnnnnnnnnnnnnnnnnnnnnnnnnnnnnnnnnnnnnnnnnnnnnnnnnnnnnnnnnnnnnnnnnnnnnnnnnnnnnnnnnnnnnnnnnnnnnnnnnnnnnnnnnnnnnnnnnnnnnnnnnnnnnnnnnnnnnnnnnnnnnnnnnnnnnnnnnnnnnnnnnnnnnnnnnnnnnnnnnnnnnnnnnnnnnnnnnnnnnnnnnnnnnnnnnnnnnnnnnnnnnnnnnnnnnnnnnnnnnnnnnnnnnnnnnnnnnnnnnnnnnnnnnnnnnnnnnnnnnnnnnnnnnnnnnnnnnnnnnnnnnnnnnnnnnnnnnnnnnnnnnnnnnnnnnnnnnnnnnnnnnnnnnnnnnnnnnnnnnnnnnnnnnnnnnnnnnnnnnnnnnnnnnnnnnnnnnnnnnnnnnnnnnnnnnnnnnnnnnnnnnnnnnnnnnnnnnnnnnnnnnnnnnnnnnnnnnnnnnnnnnnnnnnnnnnnnnnnnnnnnnnnnnnnnnnnnnnnnnnnnnnnnnnnnnnnnnnnnnnnnnnnnnnnnnnnnnnnnnnnnnnnnnnnnnnnnnnnnnnnnnnnnnnnnnnnnnnnnnnnnnnnnnnnnnnnnnnnnnnnnnnnnnnnnnnnnnnnnnnnnnnnnnnnnnnnnnnnnnnnnnnnnnnnnnnnnnnnnnnnnnnnnnnnnnnnnnnnnnnnnnnnnnnnnnnnnnnnnnnnnnnnnnnnnnnnnnnnnnnnnnnnnnnnnnnnnnnnnnnnnnnnnnnnnnnnnnnnnnnnnnnnnnnnnnnnnnnnnnnnnnnnnnnnnnnnnnnnnnnnnnnnnnnnnnnnnnnnnnnnnnnnnnnnnnnnnnnnnnnnnnnnnnnnnnnnnnnnnnnnnnnnnnnnnnnnnnnnnnnnnnnnnnnnnnnnnnnnnnnnnnnnnnnnnnnnnnnnnnnnnnnnnnnnnnnnnnnnnnnnnnnnnnnnnnnnnnnnnnnnnnnnnnnnnnnnnnnnnnnnnnnnnnnnnnnnnnnnnnnnnnnnnnnnnnnnnnnnnnnnnnnnnnnnnnnnnnnnnnnnnnnnnnnnnnnnnnnnnnnnnnnnnnnnnnnnnnnnnnnnnnnnnnnnnnnnnnnnnnnnnnnnnnnnnnnnnnnnnnnnnnnnnnnnnnnnnnnnnnnnnnnnnnnnnnnnnnnnnnnnnnnnnnnnnnnnnnnnnnnnnnnnnnnnnnnnnnnnnnnnnnnnnnnnnnnnnnnnnnnnnnnnnnnnnnnnnnnnnnnnnnnnnnnnnnnnnnnnnnnnnnnnnnnnnnnnnnnnnnnnnnnnnnnnnnnnnnnnnnnnnnnnnnnnnnnnnnnnnnnnnnnnnnnnnnnnnnnnnnnnnnnnnnnnnnnnnnnnnnnnnnnnnnnnnnnnnnnnnnnnnnnnnnnnnnnnnnnnnnnnnnnnnnnnnnnnnnnnnnnnnnnnnnnnnnnnnnnnnnnnnnnnnnnnnnnnnnnnnnnnnnnnnnnnnnnnnnnnnnnnnnnnnnnnnnnnnnnnnnnnnnnnnnnnnnnnnnnnnnnnnnnnnnnnnnnnnnnnnnnnnnnnnnnnnnnnnnnnnnnnnnnnnnnnnnnnnnnnnnnnnnnnnnnnnnnnnnnnnnnnnnnnnnnnnnnnnnnnnnnnnnnnnnnnnnnnnnnnnnnnnnnnnnnnnnnnnnnnnnnnnnnnnnnnnnnnnnnnnnnnnnnnnnnnnnnnnnnnnnnnnnnnnnnnnnnnnnnnnnnnnnnnnnnnnnnnnnnnnnnnnnnnnnnnnnnnnnnnnnnnnnnnnnnnnnnnnnnnnnnnnnnnnnnnnnnnnnnnnnnnnnnnnnnnnnnnnnnnnnnnnnnnnnnnnnnnnnnnnnnnnnnnnnnnnnnnnnnnnnnnnnnnnnnnnnnnnnnnnnnnnnnnnnnnnnnnnnnnnnnnnnnnnnnnnnnnnnnnnnnnnnnnnnnnnnnnnnnnnnnnnnnnnnnnnnnnnnnnnnnnnnnnnnnnnnnnnnnnnnnnnnnnnnnnnnnnnnnnnnnnnnnnnnnnnnnnnnnnnnnnnnnnnnnnnnnnnnnnnnnnnnnnnnnnnnnnnnnnnnnnnnnnnnnnnnnnnnnnnnnnnnnnnnnnnnnnnnnnnnnnnnnnnnnnnnnnnnnnnnnnnnnnnnnnnnnnnnnnnnnnnnnnnnnnnnnnnnnnnnnnnnnnnnnnnnnnnnnnnnnnnnnnnnnnnnnnnnnnnnnnnnnnnnnnnnnnnnnnnnnnnnnnnnnnnnnnnnnnnnnnnnnnnnnnnnnnnnnnnnnnnnnnnnnnnnnnnnnnnnnnnnnnnnnnnnnnnnnnnnnnnnnnnnnnnnnnnnnnnnnnnnnnnnnnnnnnnnnnnnnnnnnnnnnnnnnnnnnnnnnnnnnnnnnnnnnnnnnnnnnnnnnnnnnnnnnnnnnnnnnnnnnnnnnnnnnnnnnnnnnnnnnnnnnnnnnnnnnnnnnnnnnnnnnnnnnnnnnnnnnnnnnnnnnnnnnnnnnnnnnnnnnnnnnnnnnnnnnnnnnnnnnnnnnnnnnnnnnnnnnnnnnnnnnnnnnnnnnnnnnnnnnnnnnnnnnnnnnnnnnnnnnnnnnnnnnnnnnnnnnnnnnnnnnnnnnnnnnnnnnnnnnnnnnnnnnnnnnnnnnnnnnnnnnnnnnnnnnnnnnnnnnnnnnnnnnnnnnnnnnnnnnnnnnnnnnnnnnnnnnnnnnnnnnnnnnnnnnnnnnnnnnnnnnnnnnnnnnnnnnnnnnnnnnnnnnnnnnnnnnnnnnnnnnnnnnnnnnnnnnnnnnnnnnnnnnnnnnnnnnnnnnnnnnnnnnnnnnnnnnnnnnnnnnnnnnnnnnnnnnnnnnnnnnnnnnnnnnnnnnnnnnnnnnnnnnnnnnnnnnnnnnnnnnnnnnnnnnnnnnnnnnnnnnnnnnnnnnnnnnnnnnnnnnnnnnnnnnnnnnnnnnnnnnnnnnnnnnnnnnnnnnnnnnnnnnnnnnnnnnnnnnnnnnnnnnnnnnnnnnnnnnnnnnnnnnnnnnnnnnnnnnnnnnnnnnnnnnnnnnnnnnnnnnnnnnnnnnnnnnnnnnnnnnnnnnnnnnnnnnnnnnnnnnnnnnnnnnnnnnnnnnnnnnnnnnnnnnnnnnnnnnnnnnnnnnnnnnnnnnnnnnnnnnnnnnnnnnnnnnnnnnnnnnnnnnnnnnnnnnnnnnnnnnnnnnnnnnnnnnnnnnnnnnnnnnnnnnnnnnnnnnnnnnnnnnnnnnnnnnnnnnnnnnnnnnnnnnnnnnnnnnnnnnnnnnnnnnnnnnnnnnnnnnnnnnnnnnnnnnnnnnnnnnnnnnnnnnnnnnnnnnnnnnnnnnnnnnnnnnnnnnnnnnnnnnnnnnnnnnnnnnnnnnnnnnnnnnnnnnnnnnnnnnnnnnnnnnnnnnnnnnnnnnnnnnnnnnnnnnnnnnnnnnnnnnnnnnnnnnnnnnnnnnnnnnnnnnnnnnnnnnnnnnnnnnnnnnnnnnnnnnnnnnnnnnnnnnnnnnnnnnnnnnnnnnnnnnnnnnnnnnnnnnnnnnnnnnnnnnnnnnnnnnnnnnnnnnnnnnnnnnnnnnnnnnnnnnnnnnnnnnnnnnnnnnnnnnnnnnnnnnnnnnnnnnnnnnnnnnnnnnnnnnnnnnnnnnnnnnnnnnnnnnnnnnnnnnnnnnnnnnnnnnnnnnnnnnnnnnnnnnnnnnnnnnnnnnnnnnnnnnnnnnnnnnnnnnnnnnnnnnnnnnnnnnnnnnnnnnnnnnnnnnnnnnnnnnnnnnnnnnnnnnnnnnnnnnnnnnnnnnnnnnnnnnnnnnnnnnnnnnnnnnnnnnnnnnnnnnnnnnnnnnnnnnnnnnnnnnnnnnnnnnnnnnnnnnnnnnnnnnnnnnnnnnnnnnnnnnnnnnnnnnnnnnnnnnnnnnnnnnnnnnnnnnnnnnnnnnnnnnnnnnnnnnnnnnnnnnnnnnnnnnnnnnnnnnnnnnnnnnnnnnnnnnnnnnnnnnnnnnnnnnnnnnnnnnnnnnnnnnnnnnnnnnnnnnnnnnnnnnnnnnnnnnnnnnnnnnnnnnnnnnnnnnnnnnnnnnnnnnnnnnnnnnnnnnnnnnnnnnnnnnnnnnnnnnnnnnnnnnnnnnnnnnnnnnnnnnnnnnnnnnnnnnnnnnnnnnnnnnnnnnnnnnnnnnnnnnnnnnnnnnnnnnnnnnnnnnnnnnnnnnnnnnnnnnnnnnnnnnnnnnnnnnnnnnnnnnnnnnnnnnnnnnnnnnnnnnnnnnnnnnnnnnnnnnnnnnnnnnnnnnnnnnnnnnnnnnnnnnnnnnnnnnnnnnnnnnnnnnnnnnnnnnnnnnnnnnnnnnnnnnnnnnnnnnnnnnnnnnnnnnnnnnnnnnnnnnnnnnnnnnnnnnnnnnnnnnnnnnnnnnnnnnnnnnnnnnnnnnnnnnnnnnnnnnnnnnnnnnnnnnnnnnnnnnnnnnnnnnnnnnnnnnnnnnnnnnnnnnnnnnnnnnnnnnnnnnnnnnnnnnnnnnnnnnnnnnnnnnnnnnnnnnnnnnnnnnnnnnnnnnnnnnnnnnnnnnnnnnnnnnnnnnnnnnnnnnnnnnnnnnnnnnnnnnnnnnnnnnnnnnnnnnnnnnnnnnnnnnnnnnnnnnnnnnnnnnnnnnnnnnnnnnnnnnnnnnnnnnnnnnnnnnnnnnnnnnnnnnnnnnnnnnnnnnnnnnnnnnnnnnnnnnnnnnnnnnnnnnnnnnnnnnnnnnnnnnnnnnnnnnnnnnnnnnnnnnnnnnnnnnnnnnnnnnnnnnnnnnnnnnnnnnnnnnnnnnnnnnnnnnnnnnnnnnnnnnnnnnnnnnnnnnnnnnnnnnnnnnnnnnnnnnnnnnnnnnnnnnnnnnnnnnnnnnnnnnnnnnnnnnnnnnnnnnnnnnnnnnnnnnnnnnnnnnnnnnnnnnnnnnnnnnnnnnnnnnnnnnnnnnnnnnnnnnnnnnnnnnnnnnnnnnnnnnnnnnnnnnnnnnnnnnnnnnnnnnnnnnnnnnnnnnnnnnnnnnnnnnnnnnnnnnnnnnnnnnnnnnnnnnnnnnnnnnnnnnnnnnnnnnnnnnnnnnnnnnnnnnnnnnnnnnnnnnnnnnnnnnnnnnnnnnnnnnnnnnnnnnnnnnnnnnnnnnnnnnnnnnnnnnnnnnnnnnnnnnnnnnnnnnnnnnnnnnnnnnnnnnnnnnnnnnnnnnnnnnnnnnnnnnnnnnnnnnnnnnnnnnnnnnnnnnnnnnnnnnnnnnnnnnnnnnnnnnnnnnnnnnnnnnnnnnnnnnnnnnnnnnnnnnnnnnnnnnnnnnnnnnnnnnnnnnnnnnnnnnnnnnnnnnnnnnnnnnnnnnnnnnnnnnnnnnnnnnnnnnnnnnnnnnnnnnnnnnnnnnnnnnnnnnnnnnnnnnnnnnnnnnnnnnnnnnnnnnnnnnnnnnnnnnnnnnnnnnnnnnnnnnnnnnnnnnnnnnnnnnnnnnnnnnnnnnnnnnnnnnnnnnnnnnnnnnnnnnnnnnnnnnnnnnnnnnnnnnnnnnnnnnnnnnnnnnnnnnnnnnnnnnnnnnnnnnnnnnnnnnnnnnnnnnnnnnnnnnnnnnnnnnnnnnnnnnnnnnnnnnnnnnnnnnnnnnnnnnnnnnnnnnnnnnnnnnnnnnnnnnnnnnnnnnnnnnnnnnnnnnnnnnnnnnnnnnnnnnnnnnnnnnnnnnnnnnnnnnnnnnnnnnnnnnnnnnnnnnnnnnnnnnnnnnnnnnnnnnnnnnnnnnnnnnnnnnnnnnnnnnnnnnnnnnnnnnnnnnnnnnnnnnnnnnnnnnnnnnnnnnnnnnnnnnnnnnnnnnnnnnnnnnnnnnnnnnnnnnnnnnnnnnnnnnnnnnnnnnnnnnnnnnnnnnnnnnnnnnnnnnnnnnnnnnnnnnnnnnnnnnnnnnnnnnnnnnnnnnnnnnnnnnnnnnnnnnnnnnnnnnnnnnnnnnnnnnnnnnnnnnnnnnnnnnnnnnnnnnnnnnnnnnnnnnnnnnnnnnnnnnnnnnnnnnnnnnnnnnnnnnnnnnnnnnnnnnnnnnnnnnnnnnnnnnnnnnnnnnnnnnnnnnnnnnnnnnnnnnnnnnnnnnnnnnnnnnnnnnnnnnnnnnnnnnnnnnnnnnnnnnnnnnnnnnnnnnnnnnnnnnnnnnnnnnnnnnnnnnnnnnnnnnnnnnnnnnnnnnnnnnnnnnnnnnnnnnnnnnnnnnnnnnnnnnnnnnnnnnnnnnnnnnnnnnnnnnnnnnnnnnnnnnnnnnnnnnnnnnnnnnnnnnnnnnnnnnnnnnnnnnnnnnnnnnnnnnnnnnnnnnnnnnnnnnnnnnnnnnnnnnnnnnnnnnnnnnnnnnnnnnnnnnnnnnnnnnnnnnnnnnnnnnnnnnnnnnnnnnnnnnnnnnnnnnnnnnnnnnnnnnnnnnnnnnnnnnnnnnnnnnnnnnnnnnnnnnnnnnnnnnnnnnnnnnnnnnnnnnnnnnnnnnnnnnnnnnnnnnnnnnnnnnnnnnnnnnnnnnnnnnnnnnnnnnnnnnnnnnnnnnnnnnnnnnnnnnnnnnnnnnnnnnnnnnnnnnnnnnnnnnnnnnnnnnnnnnnnnnnnnnnnnnnnnnnnnnnnnnnnnnnnnnnnnnnnnnnnnnnnnnnnnnnnnnnnnnnnnnnnnnnnnnnnnnnnnnnnnnnnnnnnnnnnnnnnnnnnnnnnnnnnnnnnnnnnnnnnnnnnnnnnnnnnnnnnnnnnnnnnnnnnnnnnnnnnnnnnnnnnnnnnnnnnnnnnnnnnnnnnnnnnnnnnnnnnnnnnnnnnnnnnnnnnnnnnnnnnnnnnnnnnnnnnnnnnnnnnnnnnnnnnnnnnnnnnnnnnnnnnnnnnnnnnnnnnnnnnnnnnnnnnnnnnnnnnnnnnnnnnnnnnnnnnnnnnnnnnnnnnnnnnnnnnnnnnnnnnnnnnnnnnnnnnnnnnnnnnnnnnnnnnnnnnnnnnnnnnnnnnnnnnnnnnnnnnnnnnnnnnnnnnnnnnnnnnnnnnnnnnnnnnnnnnnnnnnnnnnnnnnnnnnnnnnnnnnnnnnnnnnnnnnnnnnnnnnnnnnnnnnnnnnnnnnnnnnnnnnnnnnnnnnnnnnnnnnnnnnnnnnnnnnnnnnnnnnnnnnnnnnnnnnnnnnnnnnnnnnnnnnnnnnnnnnnnnnnnnnnnnnnnnnnnnnnnnnnnnnnnnnnnnnnnnnnnnnnnnnnnnnnnnnnnnnnnnnnnnnnnnnnnnnnnnnnnnnnnnnnnnnnnnnnnnnnnnnnnnnnnnnnnnnnnnnnnnnnnnnnnnnnnnnnnnnnnnnnnnnnnnnnnnnnnnnnnnnnnnnnnnnnnnnnnnnnnnnnnnnnnnnnnnnnnnnnnnnnnnnnnnnnnnnnnnnnnnnnnnnnnnnnnnnnnnnnnnnnnnnnnnnnnnnnnnnnnnnnnnnnnnnnnnnnnnnnnnnnnnnnnnnnnnnnnnnnnnnnnnnnnnnnnnnnnnnnnnnnnnnnnnnnnnnnnnnnnnnnnnnnnnnnnnnnnnnnnnnnnnnnnnnnnnnnnnnnnnnnnnnnnnnnnnnnnnnnnnnnnnnnnnnnnnnnnnnnnnnnnnnnnnnnnnnnnnnnnnnnnnnnnnnnnnnnnnnnnnnnnnnnnnnnnnnnnnnnnnnnnnnnnnnnnnnnnnnnnnnnnnnnnnnnnnnnnnnnnnnnnnnnnnnnnnnnnnnnnnnnnnnnnnnnnnnnnnnnnnnnnnnnnnnnnnnnnnnnnnnnnnnnnnnnnnnnnnnnnnnnnnnnnnnnnnnnnnnnnnnnnnnnnnnnnnnnnnnnnnnnnnnnnnnnnnnnnnnnnnnnnnnnnnnnnnnnnnnnnnnnnnnnnnnnnnnnnnnnnnnnnnnnnnnnnnnnnnnnnnnnnnnnnnnnnnnnnnnnnnnnnnnnnnnnnnnnnnnnnnnnnnnnnnnnnnnnnnnnnnnnnnnnnnnnnnnnnnnnnnnnnnnnnnnnnnnnnnnnnnnnnnnnnnnnnnnnnnnnnnnnnnnnnnnnnnnnnnnnnnnnnnnnnnnnnnnnnnnnnnnnnnnnnnnnnnnnnnnnnnnnnnnnnnnnnnnnnnnnnnnnnnnnnnnnnnnnnnnnnnnnnnnnnnnnnnnnnnnnnnnnnnnnnnnnnnnnnnnnnnnnnnnnnnnnnnnnnnnnnnnnnnnnnnnnnnnnnnnnnnnnnnnnnnnnnnnnnnnnnnnnnnnnnnnnnnnnnnnnnnnnnnnnnnnnnnnnnnnnnnnnnnnnnnnnnnnnnnnnnnnnnnnnnnnnnnnnnnnnnnnnnnnnnnnnnnnnnnnnnnnnnnnnnnnnnnnnnnnnnnnnnnnnnnnnnnnnnnnnnnnnnnnnnnnnnnnnnnnnnnnnnnnnnnnnnnnnnnnnnnnnnnnnnnnnnnnnnnnnnnnnnnnnnnnnnnnnnnnnnnnnnnnnnnnnnnnnnnnnnnnnnnnnnnnnnnnnnnnnnnnnnnnnnnnnnnnnnnnnnnnnnnnnnnnnnnnnnnnnnnnnnnnnnnnnnnnnnnnnnnnnnnnnnnnnnnnnnnnnnnnnnnnnnnnnnnnnnnnnnnnnnnnnnnnnnnnnnnnnnnnnnnnnnnnnnnnnnnnnnnnnnnnnnnnnnnnnnnnnnnnnnnnnnnnnnnnnnnnnnnnnnnnnnnnnnnnnnnnnnnnnnnnnnnnnnnnnnnnnnnnnnnnnnnnnnnnnnnnnnnnnnnnnnnnnnnnnnnnnnnnnnnnnnnnnnnnnnnnnnnnnnnnnnnnnnnnnnnnnnnnnnnnnnnnnnnnnnnnnnnnnnnnnnnnnnnnnnnnnnnnnnnnnnnnnnnnnnnnnnnnnnnnnnnnnnnnnnnnnnnnnnnnnnnnnnnnnnnnnnnnnnnnnnnnnnnnnnnnnnnnnnnnnnnnnnnnnnnnnnnnnnnnnnnnnnnnnnnnnnnnnnnnnnnnnnnnnnnnnnnnnnnnnnnnnnnnnnnnnnnnnnnnnnnnnnnnnnnnnnnnnnnnnnnnnnnnnnnnnnnnnnnnnnnnnnnnnnnnnnnnnnnnnnnnnnnnnnnnnnnnnnnnnnnnnnnnnnnnnnnnnnnnnnnnnnnnnnnnnnnnnnnnnnnnnnnnnnnnnnnnnnnnnnnnnnnnnnnnnnnnnnnnnnnnnnnnnnnnnnnnnnnnnnnnnnnnnnnnnnnnnnnnnnnnnnnnnnnnnnnnnnnnnnnnnnnnnnnnnnnnnnnnnnnnnnnnnnnnnnnnnnnnnnnnnnnnnnnnnnnnnnnnnnnnnnnnnnnnnnnnnnnnnnnnnnnnnnnnnnnnnnnnnnnnnnnnnnnnnnnnnnnnnnnnnnnnnnnnnnnnnnnnnnnnnnnnnnnnnnnnnnnnnnnnnnnnnnnnnnnnnnnnnnnnnnnnnnnnnnnnnnnnnnnnnnnnnnnnnnnnnnnnnnnnnnnnnnnnnnnnnnnnnnnnnnnnnnnnnnnnnnnnnnnnnnnnnnnnnnnnnnnnnnnnnnnnnnnnnnnnnnnnnnnnnnnnnnnnnnnnnnnnnnnnnnnnnnnnnnnnnnnnnnnnnnnnnnnnnnnnnnnnnnnnnnnnnnnnnnnnnnnnnnnnnnnnnnnnnnnnnnnnnnnnnnnnnnnnnnnnnnnnnnnnnnnnnnnnnnnnnnnnnnnnnnnnnnnnnnnnnnnnnnnnnnnnnnnnnnnnnnnnnnnnnnnnnnnnnnnnnnnnnnnnnnnnnnnnnnnnnnnnnnnnnnnnnnnnnnnnnnnnnnnnnnnnnnnnnnnnnnnnnnnnnnnnnnnnnnnnnnnnnnnnnnnnnnnnnnnnnnnnnnnnnnnnnnnnnnnnnnnnnnnnnnnnnnnnnnnnnnnnnnnnnnnnnnnnnnnnnnnnnnnnnnnnnnnnnnnnnnnnnnnnnnnnnnnnnnnnnnnnnnnnnnnnnnnnnnnnnnnnnnnnnnnnnnnnnnnnnnnnnnnnnnnnnnnnnnnnnnnnnnnnnnnnnnnnnnnnnnnnnnnnnnnnnnnnnnnnnnnnnnnnnnnnnnnnnnnnnnnnnnnnnnnnnnnnnnnnnnnnnnnnnnnnnnnnnnnnnnnnnnnnnnnnnnnnnnnnnnnnnnnnnnnnnnnnnnnnnnnnnnnnnnnnnnnnnnnnnnnnnnnnnnnnnnnnnnnnnnnnnnnnnnnnnnnnnnnnnnnnnnnnnnnnnnnnnnnnnnnnnnnnnnnnnnnnnnnnnnnnnnnnnnnnnnnnnnnnnnnnnnnnnnnnnnnnnnnnnnnnnnnnnnnnnnnnnnnnnnnnnnnnnnnnnnnnnnnnnnnnnnnnnnnnnnnnnnnnnnnnnnnnnnnnnnnnnnnnnnnnnnnnnnnnnnnnnnnnnnnnnnnnnnnnnnnnnnnnnnnnnnnnnnnnnnnnnnnnnnnnnnnnnnnnnnnnnnnnnnnnnnnnnnnnnnnnnnnnnnnnnnnnnnnnnnnnnnnnnnnnnnnnnnnnnnnnnnnnnnnnnnnnnnnnnnnnnnnnnnnnnnnnnnnnnnnnnnnnnnnnnnnnnnnnnnnnnnnnnnnnnnnnnnnnnnnnnnnnnnnnnnnnnnnnnnnnnnnnnnnnnnnnnnnnnnnnnnnnnnnnnnnnnnnnnnnnnnnnnnnnnnnnnnnnnnnnnnnnnnnnnnnnnnnnnnnnnnnnnnnnnnnnnnnnnnnnnnnnnnnnnnnnnnnnnnnnnnnnnnnnnnnnnnnnnnnnnnnnnnnnnnnnnnnnnnnnnnnnnnnnnnnnnnnnnnnnnnnnnnnnnnnnnnnnnnnnnnnnnnnnnnnnnnnnnnnnnnnnnnnnnnnnnnnnnnnnnnnnnnnnnnnnnnnnnnnnnnnnnnnnnnnnnnnnnnnnnnnnnnnnnnnnnnnnnnnnnnnnnnnnnnnnnnnnnnnnnnnnnnnnnnnnnnnnnnnnnnnnnnnnnnnnnnnnnnnnnnnnnnnnnnnnnnnnnnnnnnnnnnnnnnnnnnnnnnnnnnnnnnnnnnnnnnnnnnnnnnnnnnnnnnnnnnnnnnnnnnnnnnnnnnnnnnnnnnnnnnnnnnnnnnnnnnnnnnnnnnnnnnnnnnnnnnnnnnnnnnnnnnnnnnnnnnnnnnnnnnnnnnnnnnnnnnnnnnnnnnnnnnnnnnnnnnnnnnnnnnnnnnnnnnnnnnnnnnnnnnnnnnnnnnnnnnnnnnnnnnnnnnnnnnnnnnnnnnnnnnnnnnnnnnnnnnnnnnnnnnnnnnnnnnnnnnnnnnnnnnnnnnnnnnnnnnnnnnnnnnnnnnnnnnnnnnnnnnnnnnnnnnnnnnnnnnnnnnnnnnnnnnnnnnnnnnnnnnnnnnnnnnnnnnnnnnnnnnnnnnnnnnnnnnnnnnnnnnnnnnnnnnnnnnnnnnnnnnnnnnnnnnnnnnnnnnnnnnnnnnnnnnnnnnnnnnnnnnnnnnnnnnnnnnnnnnnnnnnnnnnnnnnnnnnnnnnnnnnnnnnnnnnnnnnnnnnnnnnnnnnnnnnnnnnnnnnnnnnnnnnnnnnnnnnnnnnnnnnnnnnnnnnnnnnnnnnnnnnnnnnnnnnnnnnnnnnnnnnnnnnnnnnnnnnnnnnnnnnnnnnnnnnnnnnnnnnnnnnnnnnnnnnnnnnnnnnnnnnnnnnnnnnnnnnnnnnnnnnnnnnnnnnnnnnnnnnnnnnnnnnnnnnnnnnnnnnnnnnnnnnnnnnnnnnnnnnnnnnnnnnnnnnnnnnnnnnnnnnnnnnnnnnnnnnnnnnnnnnnnnnnnnnnnnnnnnnnnnnnnnnnnnnnnnnnnnnnnnnnnnnnnnnnnnnnnnnnnnnnnnnnnnnnnnnnnnnnnnnnnnnnnnnnnnnnnnnnnnnnnnnnnnnnnnnnnnnnnnnnnnnnnnnnnnnnnnnnnnnnnnnnnnnnnnnnnnnnnnnnnnnnnnnnnnnnnnnnnnnnnnnnnnnnnnnnnnnnnnnnnnnnnnnnnnnnnnnnnnnnnnnnnnnnnnnnnnnnnnnnnnnnnnnnnnnnnnnnnnnnnnnnnnnnnnnnnnnnnnnnnnnnnnnnnnnnnnnnnnnnnnnnnnnnnnnnnnnnnnnnnnnnnnnnnnnnnnnnnnnnnnnnnnnnnnnnnnnnnnnnnnnnnnnnnnnnnnnnnnnnnnnnnnnnnnnnnnnnnnnnnnnnnnnnnnnnnnnnnnnnnnnnnnnnnnnnnnnnnnnnnnnnnnnnnnnnnnnnnnnnnnnnnnnnnnnnnnnnnnnnnnnnnnnnnnnnnnnnnnnnnnnnnnnnnnnnnnnnnnnnnnnnnnnnnnnnnnnnnnnnnnnnnnnnnnnnnnnnnnnnnnnnnnnnnnnnnnnnnnnnnnnnnnnnnnnnnnnnnnnnnnnnnnnnnnnnnnnnnnnnnnnnnnnnnnnnnnnnnnnnnnnnnnnnnnnnnnnnnnnnnnnnnnnnnnnnnnnnnnnnnnnnnnnnnnnnnnnnnnnnnnnnnnnnnnnnnnnnnnnnnnnnnnnnnnnnnnnnnnnnnnnnnnnnnnnnnnnnnnnnnnnnnnnnnnnnnnnnnnnnnnnnnnnnnnnnnnnnnnnnnnnnnnnnnnnnnnnnnnnnnnnnnnnnnnnnnnnnnnnnnnnnnnnnnnnnnnnnnnnnnnnnnnnnnnnnnnnnnnnnnnnnnnnnnnnnnnnnnnnnnnnnnnnnnnnnnnnnnnnnnnnnnnnnnnnnnnnnnnnnnnnnnnnnnnnnnnnnnnnnnnnnnnnnnnnnnnnnnnnnnnnnnnnnnnnnnnnnnnnnnnnnnnnnnnnnnnnnnnnnnnnnnnnnnnnnnnnnnnnnnnnnnnnnnnnnnnnnnnnnnnnnnnnnnnnnnnnnnnnnnnnnnnnnnnnnnnnnnnnnnnnnnnnnnnnnnnnnnnnnnnnnnnnnnnnnnnnnnnnnnnnnnnnnnnnnnnnnnnnnnnnnnnnnnnnnnnnnnnnnnnnnnnnnnnnnnnnnnnnnnnnnnnnnnnnnnnnnnnnnnnnnnnnnnnnnnnnnnnnnnnnnnnnnnnnnnnnnnnnnnnnnnnnnnnnnnnnnnnnnnnnnnnnnnnnnnnnnnnnnnnnnnnnnnnnnnnnnnnnnnnnnnnnnnnnnnnnnnnnnnnnnnnnnnnnnnnnnnnnnnnnnnnnnnnnnnnnnnnnnnnnnnnnnnnnnnnnnnnnnnnnnnnnnnnnnnnnnnnnnnnnnnnnnnnnnnnnnnnnnnnnnnnnnnnnnnnnnnnnnnnnnnnnnnnnnnnnnnnnnnnnnnnnnnnnnnnnnnnnnnnnnnnnnnnnnnnnnnnnnnnnnnnnnnnnnnnnnnnnnnnnnnnnnnnnnnnnnnnnnnnnnnnnnnnnnnnnnnnnnnnnnnnnnnnnnnnnnnnnnnnnnnnnnnnnnnnnnnnnnnnnnnnnnnnnnnnnnnnnnnnnnnnnnnnnnnnnnnnnnnnnnnnnnnnnnnnnnnnnnnnnnnnnnnnnnnnnnnnnnnnnnnnnnnnnnnnnnnnnnnnnnnnnnnnnnnnnnnnnnnnnnnnnnnnnnnnnnnnnnnnnnnnnnnnnnnnnnnnnnnnnnnnnnnnnnnnnnnnnnnnnnnnnnnnnnnnnnnnnnnnnnnnnnnnnnnnnnnnnnnnnnnnnnnnnnnnnnnnnnnnnnnnnnnnnnnnnnnnnnnnnnnnnnnnnnnnnnnnnnnnnnnnnnnnnnnnnnnnnnnnnnnnnnnnnnnnnnnnnnnnnnnnnnnnnnnnnnnnnnnnnnnnnnnnnnnnnnnnnnnnnnnnnnnnnnnnnnnnnnnnnnnnnnnnnnnnnnnnnnnnnnnnnnnnnnnnnnnnnnnnnnnnnnnnnnnnnnnnnnnnnnnnnnnnnnnnnnnnnnnnnnnnnnnnnnnnnnnnnnnnnnnnnnnnnnnnnnnnnnnnnnnnnnnnnnnnnnnnnnnnnnnnnnnnnnnnnnnnnnnnnnnnnnnnnnnnnnnnnnnnnnnnnnnnnnnnnnnnnnnnnnnnnnnnnnnnnnnnnnnnnnnnnnnnnnnnnnnnnnnnnnnnnnnnnnnnnnnnnnnnnnnnnnnnnnnnnnnnnnnnnnnnnnnnnnnnnnnnnnnnnnnnnnnnnnnnnnnnnnnnnnnnnnnnnnnnnnnnnnnnnnnnnnnnnnnnnnnnnnnnnnnnnnnnnnnnnnnnnnnnnnnnnnnnnnnnnnnnnnnnnnnnnnnnnnnnnnnnnnnnnnnnnnnnnnnnnnnnnnnnnnnnnnnnnnnnnnnnnnnnnnnnnnnnnnnnnnnnnnnnnnnnnnnnnnnnnnnnnnnnnnnnnnnnnnnnnnnnnnnnnnnnnnnnnnnnnnnnnnnnnnnnnnnnnnnnnnnnnnnnnnnnnnnnnnnnnnnnnnnnnnnnnnnnnnnnnnnnnnnnnnnnnnnnnnnnnnnnnnnnnnnnnnnnnnnnnnnnnnnnnnnnnnnnnnnnnnnnnnnnnnnnnnnnnnnnnnnnnnnnnnnnnnnnnnnnnnnnnnnnnnnnnnnnnnnnnnnnnnnnnnnnnnnnnnnnnnnnnnnnnnnnnnnnnnnnnnnnnnnnnnnnnnnnnnnnnnnnnnnnnnnnnnnnnnnnnnnnnnnnnnnnnnnnnnnnnnnnnnnnnnnnnnnnnnnnnnnnnnnnnnnnnnnnnnnnnnnnnnnnnnnnnnnnnnnnnnnnnnnnnnnnnnnnnnnnnnnnnnnnnnnnnnnnnnnnnnnnnnnnnnnnnnnnnnnnnnnnnnnnnnnnnnnnnnnnnnnnnnnnnnnnnnnnnnnnnnnnnnnnnnnnnnnnnnnnnnnnnnnnnnnnnnnnnnnnnnnnnnnnnnnnnnnnnnnnnnnnnnnnnnnnnnnnnnnnnnnnnnnnnnnnnnnnnnnnnnnnnnnnnnnnnnnnnnnnnnnnnnnnnnnnnnnnnnnnnnnnnnnnnnnnnnnnnnnnnnnnnnnnnnnnnnnnnnnnnnnnnnnnnnnnnnnnnnnnnnnnnnnnnnnnnnnnnnnnnnnnnnnnnnnnnnnnnnnnnnnnnnnnnnnnnnnnnnnnnnnnnnnnnnnnnnnnnnnnnnnnnnnnnnnnnnnnnnnnnnnnnnnnnnnnnnnnnnnnnnnnnnnnnnnnnnnnnnnnnnnnnnnnnnnnnnnnnnnnnnnnnnnnnnnnnnnnnnnnnnnnnnnnnnnnnnnnnnnnnnnnnnnnnnnnnnnnnnnnnnnnnnnnnnnnnnnnnnnnnnnnnnnnnnnnnnnnnnnnnnnnnnnnnnnnnnnnnnnnnnnnnnnnnnnnnnnnnnnnnnnnnnnnnnnnnnnnnnnnnnnnnnnnnnnnnnnnnnnnnnnnnnnnnnnnnnnnnnnnnnnnnnnnnnnnnnnnnnnnnnnnnnnnnnnnnnnnnnnnnnnnnnnnnnnnnnnnnnnnnnnnnnnnnnnnnnnnnnnnnnnnnnnnnnnnnnnnnnnnnnnnnnnnnnnnnnnnnnnnnnnnnnnnnnnnnnnnnnnnnnnnnnnnnnnnnnnnnnnnnnnnnnnnnnnnnnnnnnnnnnnnnnnnnnnnnnnnnnnnnnnnnnnnnnnnnnnnnnnnnnnnnnnnnnnnnnnnnnnnnnnnnnnnnnnnnnnnnnnnnnnnnnnnnnnnnnnnnnnnnnnnnnnnnnnnnnnnnnnnnnnnnnnnnnnnnnnnnnnnnnnnnnnnnnnnnnnnnnnnnnnnnnnnnnnnnnnnnnnnnnnnnnnnnnnnnnnnnnnnnnnnnnnnnnnnnnnnnnnnnnnnnnnnnnnnnnnnnnnnnnnnnnnnnnnnnnnnnnnnnnnnnnnnnnnnnnnnnnnnnnnnnnnnnnnnnnnnnnnnnnnnnnnnnnnnnnnnnnnnnnnnnnnnnnnnnnnnnnnnnnnnnnnnnnnnnnnnnnnnnnnnnnnnnnnnnnnnnnnnnnnnnnnnnnnnnnnnnnnnnnnnnnnnnnnnnnnnnnnnnnnnnnnnnnnnnnnnnnnnnnnnnnnnnnnnnnnnnnnnnnnnnnnnnnnnnnnnnnnnnnnnnnnnnnnnnnnnnnnnnnnnnnnnnnnnnnnnnnnnnnnnnnnnnnnnnnnnnnnnnnnnnnnnnnnnnnnnnnnnnnnnnnnnnnnnnnnnnnnnnnnnnnnnnnnnnnnnnnnnnnnnnnnnnnnnnnnnnnnnnnnnnnnnnnnnnnnnnnnnnnnnnnnnnnnnnnnnnnnnnnnnnnnnnnnnnnnnnnnnnnnnnnnnnnnnnnnnnnnnnnnnnnnnnnnnnnnnnnnnnnnnnnnnnnnnnnnnnnnnnnnnnnnnnnnnnnnnnnnnnnnnnnnnnnnnnnnnnnnnnnnnnnnnnnnnnnnnnnnnnnnnnnnnnnnnnnnnnnnnnnnnnnnnnnnnnnnnnnnnnnnnnnnnnnnnnnnnnnnnnnnnnnnnnnnnnnnnnnnnnnnnnnnnnnnnnnnnnnnnnnnnnnnnnnnnnnnnnnnnnnnnnnnnnnnnnnnnnnnnnnnnnnnnnnnnnnnnnnnnnnnnnnnnnnnnnnnnnnnnnnnnnnnnnnnnnnnnnnnnnnnnnnnnnnnnnnnnnnnnnnnnnnnnnnnnnnnnnnnnnnnnnnnnnnnnnnnnnnnnnnnnnnnnnnnnnnnnnnnnnnnnnnnnnnnnnnnnnnnnnnnnnnnnnnnnnnnnnnnnnnnnnnnnnnnnnnnnnnnnnnnnnnnnnnnnnnnnnnnnnnnnnnnnnnnnnnnnnnnnnnnnnnnnnnnnnnnnnnnnnnnnnnnnnnnnnnnnnnnnnnnnnnnnnnnnnnnnnnnnnnnnnnnnnnnnnnnnnnnnnnnnnnnnnnnnnnnnnnnnnnnnnnnnnnnnnnnnnnnnnnnnnnnnnnnnnnnnnnnnnnnnnnnnnnnnnnnnnnnnnnnnnnnnnnnnnnnnnnnnnnnnnnnnnnnnnnnnnnnnnnnnnnnnnnnnnnnnnnnnnnnnnnnnnnnnnnnnnnnnnnnnnnnnnnnnnnnnnnnnnnnnnnnnnnnnnnnnnnnnnnnnnnnnnnnnnnnnnnnnnnnnnnnnnnnnnnnnnnnnnnnnnnnnnnnnnnnnnnnnnnnnnnnnnnnnnnnnnnnnnnnnnnnnnnnnnnnnnnnnnnnnnnnnnnnnnnnnnnnnnnnnnnnnnnnnnnnnnnnnnnnnnnnnnnnnnnnnnnnnnnnnnnnnnnnnnnnnnnnnnnnnnnnnnnnnnnnnnnnnnnnnnnnnnnnnnnnnnnnnnnnnnnnnnnnnnnnnnnnnnnnnnnnnnnnnnnnnnnnnnnnnnnnnnnnnnnnnnnnnnnnnnnnnnnnnnnnnnnnnnnnnnnnnnnnnnnnnnnnnnnnnnnnnnnnnnnnnnnnnnnnnnnnnnnnnnnnnnnnnnnnnnnnnnnnnnnnnnnnnnnnnnnnnnnnnnnnnnnnnnnnnnnnnnnnnnnnnnnnnnnnnnnnnnnnnnnnnnnnnnnnnnnnnnnnnnnnnnnnnnnnnnnnnnnnnnnnnnnnnnnnnnnnnnnnnnnnnnnnnnnnnnnnnnnnnnnnnnnnnnnnnnnnnnnnnnnnnnnnnnnnnnnnnnnnnnnnnnnnnnnnnnnnnnnnnnnnnnnnnnnnnnnnnnnnnnnnnnnnnnnnnnnnnnnnnnnnnnnnnnnnnnnnnnnnnnnnnnnnnnnnnnnnnnnnnnnnnnnnnnnnnnnnnnnnnnnnnnnnnnnnnnnnnnnnnnnnnnnnnnnnnnnnnnnnnnnnnnnnnnnnnnnnnnnnnnnnnnnnnnnnnnnnnnnnnnnnnnnnnnnnnnnnnnnnnnnnnnnnnnnnnnnnnnnnnnnnnnnnnnnnnnnnnnnnnnnnnnnnnnnnnnnnnnnnnnnnnnnnnnnnnnnnnnnnnnnnnnnnnnnnnnnnnnnnnnnnnnnnnnnnnnnnnnnnnnnnnnnnnnnnnnnnnnnnnnnnnnnnnnnnnnnnnnnnnnnnnnnnnnnnnnnnnnnnnnnnnnnnnnnnnnnnnnnnnnnnnnnnnnnnnnnnnnnnnnnnnnnnnnnnnnnnnnnnnnnnnnnnnnnnnnnnnnnnnnnnnnnnnnnnnnnnnnnnnnnnnnnnnnnnnnnnnnnnnnnnnnnnnnnnnnnnnnnnnnnnnnnnnnnnnnnnnnnnnnnnnnnnnnnnnnnnnnnnnnnnnnnnnnnnnnnnnnnnnnnnnnnnnnnnnnnnnnnnnnnnnnnnnnnnnnnnnnnnnnnnnnnnnnnnnnnnnnnnnnnnnnnnnnnnnnnnnnnnnnnnnnnnnnnnnnnnnnnnnnnnnnnnnnnnnnnnnnnnnnnnnnnnnnnnnnnnnnnnnnnnnnnnnnnnnnnnnnnnnnnnnnnnnnnnnnnnnnnnnnnnnnnnnnnnnnnnnnnnnnnnnnnnnnnnnnnnnnnnnnnnnnnnnnnnnnnnnnnnnnnnnnnnnnnnnnnnnnnnnnnnnnnnnnnnnnnnnnnnnnnnnnnnnnnnnnnnnnnnnnnnnnnnnnnnnnnnnnnnnnnnnnnnnnnnnnnnnnnnnnnnnnnnnnnnnnnnnnnnnnnnnnnnnnnnnnnnnnnnnnnnnnnnnnnnnnnnnnnnnnnnnnnnnnnnnnnnnnnnnnnnnnnnnnnnnnnnnnnnnnnnnnnnnnnnnnnnnnnnnnnnnnnnnnnnnnnnnnnnnnnnnnnnnnnnnnnnnnnnnnnnnnnnnnnnnnnnnnnnnnnnnnnnnnnnnnnnnnnnnnnnnnnnnnnnnnnnnnnnnnnnnnnnnnnnnnnnnnnnnnnnnnnnnnnnnnnnnnnnnnnnnnnnnnnnnnnnnnnnnnnnnnnnnnnnnnnnnnnnnnnnnnnnnnnnnnnnnnnnnnnnnnnnnnnnnnnnnnnnnnnnnnnnnnnnnnnnnnnnnnnnnnnnnnnnnnnnnnnnnnnnnnnnnnnnnnnnnnnnnnnnnnnnnnnnnnnnnnnnnnnnnnnnnnnnnnnnnnnnnnnnnnnnnnnnnnnnnnnnnnnnnnnnnnnnnnnnnnnnnnnnnnnnnnnnnnnnnnnnnnnnnnnnnnnnnnnnnnnnnnnnnnnnnnnnnnnnnnnnnnnnnnnnnnnnnnnnnnnnnnnnnnnnnnnnnnnnnnnnnnnnnnnnnnnnnnnnnnnnnnnnnnnnnnnnnnnnnnnnnnnnnnnnnnnnnnnnnnnnnnnnnnnnnnnnnnnnnnnnnnnnnnnnnnnnnnnnnnnnnnnnnnnnnnnnnnnnnnnnnnnnnnnnnnnnnnnnnnnnnnnnnnnnnnnnnnnnnnnnnnnnnnnnnnnnnnnnnnnnnnnnnnnnnnnnnnnnnnnnnnnnnnnnnnnnnnnnnnnnnnnnnnnnnnnnnnnnnnnnnnnnnnnnnnnnnnnnnnnnnnnnnnnnnnnnnnnnnnnnnnnnnnnnnnnnnnnnnnnnnnnnnnnnnnnnnnnnnnnnnnnnnnnnnnnnnnnnnnnnnnnnnnnnnnnnnnnnnnnnnnnnnnnnnnnnnnnnnnnnnnnnnnnnnnnnnnnnnnnnnnnnnnnnnnnnnnnnnnnnnnnnnnnnnnnnnnnnnnnnnnnnnnnnnnnnnnnnnnnnnnnnnnnnnnnnnnnnnnnnnnnnnnnnnnnnnnnnnnnnnnnnnnnnnnnnnnnnnnnnnnnnnnnnnnnnnnnnnnnnnnnnnnnnnnnnnnnnnnnnnnnnnnnnnnnnnnnnnnnnnnnnnnnnnnnnnnnnnnnnnnnnnnnnnnnnnnnnnnnnnnnnnnnnnnnnnnnnnnnnnnnnnnnnnnnnnnnnnnnnnnnnnnnnnnnnnnnnnnnnnnnnnnnnnnnnnnnnnnnnnnnnnnnnnnnnnnnnnnnnnnnnnnnnnnnnnnnnnnnnnnnnnnnnnnnnnnnnnnnnnnnnnnnnnnnnnnnnnnnnnnnnnnnnnnnnnnnnnnnnnnnnnnnnnnnnnnnnnnnnnnnnnnnnnnnnnnnnnnnnnnnnnnnnnnnnnnnnnnnnnnnnnnnnnnnnnnnnnnnnnnnnnnnnnnnnnnnnnnnnnnnnnnnnnnnnnnnnnnnnnnnnnnnnnnnnnnnnnnnnnnnnnnnnnnnnnnnnnnnnnnnnnnnnnnnnnnnnnnnnnnnnnnnnnnnnnnnnnnnnnnnnnnnnnnnnnnnnnnnnnnnnnnnnnnnnnnnnnnnnnnnnnnnnnnnnnnnnnnnnnnnnnnnnnnnnnnnnnnnnnnnnnnnnnnnnnnnnnnnnnnnnnnnnnnnnnnnnnnnnnnnnnnnnnnnnnnnnnnnnnnnnnnnnnnnnnnnnnnnnnnnnnnnnnnnnnnnnnnnnnnnnnnnnnnnnnnnnnnnnnnnnnnnnnnnnnnnnnnnnnnnnnnnnnnnnnnnnnnnnnnnnnnnnnnnnnnnnnnnnnnnnnnnnnnnnnnnnnnnnnnnnnnnnnnnnnnnnnnnnnnnnnnnnnnnnnnnnnnnnnnnnnnnnnnnnnnnnnnnnnnnnnnnnnnnnnnnnnnnnnnnnnnnnnnnnnnnnnnnnnnnnnnnnnnnnnnnnnnnnnnnnnnnnnnnnnnnnnnnnnnnnnnnnnnnnnnnnnnnnnnnnnnnnnnnnnnnnnnnnnnnnnnnnnnnnnnnnnnnnnnnnnnnnnnnnnnnnnnnnnnnnnnnnnnnnnnnnnnnnnnnnnnnnnnnnnnnnnnnnnnnnnnnnnnnnnnnnnnnnnnnnnnnnnnnnnnnnnnnnnnnnnnnnnnnnnnnnnnnnnnnnnnnnnnnnnnnnnnnnnnnnnnnnnnnnnnnnnnnnnnnnnnnnnnnnnnnnnnnnnnnnnnnnnnnnnnnnnnnnnnnnnnnnnnnnnnnnnnnnnnnnnnnnnnnnnnnnnnnnnnnnnnnnnnnnnnnnnnnnnnnnnnnnnnnnnnnnnnnnnnnnnnnnnnnnnnnnnnnnnnnnnnnnnnnnnnnnnnnnnnnnnnnnnnnnnnnnnnnnnnnnnnnnnnnnnnnnnnnnnnnnnnnnnnnnnnnnnnnnnnnnnnnnnnnnnnnnnnnnnnnnnnnnnnnnnnnnnnnnnnnnnnnnnnnnnnnnnnnnnnnnnnnnnnnnnnnnnnnnnnnnnnnnnnnnnnnnnnnnnnnnnnnnnnnnnnnnnnnnnnnnnnnnnnnnnnnnnnnnnnnnnnnnnnnnnnnnnnnnnnnnnnnnnnnnnnnnnnnnnnnnnnnnnnnnnnnnnnnnnnnnnnnnnnnnnnnnnnnnnnnnnnnnnnnnnnnnnnnnnnnnnnnnnnnnnnnnnnnnnnnnnnnnnnnnnnnnnnnnnnnnnnnnnnnnnnnnnnnnnnnnnnnnnnnnnnnnnnnnnnnnnnnnnnnnnnnnnnnnnnnnnnnnnnnnnnnnnnnnnnnnnnnnnnnnnnnnnnnnnnnnnnnnnnnnnnnnnnnnnnnnnnnnnnnnnnnnnnnnnnnnnnnnnnnnnnnnnnnnnnnnnnnnnnnnnnnnnnnnnnnnnnnnnnnnnnnnnnnnnnnnnnnnnnnnnnnnnnnnnnnnnnnnnnnnnnnnnnnnnnnnnnnnnnnnnnnnnnnnnnnnnnnnnnnnnnnnnnnnnnnnnnnnnnnnnnnnnnnnnnnnnnnnnnnnnnnnnnnnnnnnnnnnnnnnnnnnnnnnnnnnnnnnnnnnnnnnnnnnnnnnnnnnnnnnnnnnnnnnnnnnnnnnnnnnnnnnnnnnnnnnnnnnnnnnnnnnnnnnnnnnnnnnnnnnnnnnnnnnnnnnnnnnnnnnnnnnnnnnnnnnnnnnnnnnnnnnnnnnnnnnnnnnnnnnnnnnnnnnnnnnnnnnnnnnnnnnnnnnnnnnnnnnnnnnnnnnnnnnnnnnnnnnnnnnnnnnnnnnnnnnnnnnnnnnnnnnnnnnnnnnnnnnnnnnnnnnnnnnnnnnnnnnnnnnnnnnnnnnnnnnnnnnnnnnnnnnnnnnnnnnnnnnnnnnnnnnnnnnnnnnnnnnnnnnnnnnnnnnnnnnnnnnnnnnnnnnnnnnnnnnnnnnnnnnnnnnnnnnnnnnnnnnnnnnnnnnnnnnnnnnnnnnnnnnnnnnnnnnnnnnnnnnnnnnnnnnnnnnnnnnnnnnnnnnnnnnnnnnnnnnnnnnnnnnnnnnnnnnnnnnnnnnnnnnnnnnnnnnnnnnnnnnnnnnnnnnnnnnnnnnnnnnnnnnnnnnnnnnnnnnnnnnnnnnnnnnnnnnnnnnnnnnnnnnnnnnnnnnnnnnnnnnnnnnnnnnnnnnnnnnnnnnnnnnnnnnnnnnnnnnnnnnnnnnnnnnnnnnnnnnnnnnnnnnnnnnnnnnnnnnnnnnnnnnnnnnnnnnnnnnnnnnnnnnnnnnnnnnnnnnnnnnnnnnnnnnnnnnnnnnnnnnnnnnnnnnnnnnnnnnnnnnnnnnnnnnnnnnnnnnnnnnnnnnnnnnnnnnnnnnnnnnnnnnnnnnnnnnnnnnnnnnnnnnnnnnnnnnnnnnnnnnnnnnnnnnnnnnnnnnnnnnnnnnnnnnnnnnnnnnnnnnnnnnnnnnnnnnnnnnnnnnnnnnnnnnnnnnnnnnnnnnnnnnnnnnnnnnnnnnnnnnnnnnnnnnnnnnnnnnnnnnnnnnnnnnnnnnnnnnnnnnnnnnnnnnnnnnnnnnnnnnnnnnnnnnnnnnnnnnnnnnnnnnnnnnnnnnnnnnnnnnnnnnnnnnnnnnnnnnnnnnnnnnnnnnnnnnnnnnnnnnnnnnnnnnnnnnnnnnnnnnnnnnnnnnnnnnnnnnnnnnnnnnnnnnnnnnnnnnnnnnnnnnnnnnnnnnnnnnnnnnnnnnnnnnnnnnnnnnnnnnnnnnnnnnnnnnnnnnnnnnnnnnnnnnnnnnnnnnnnnnnnnnnnnnnnnnnnnnnnnnnnnnnnnnnnnnnnnnnnnnnnnnnnnnnnnnnnnnnnnnnnnnnnnnnnnnnnnnnnnnnnnnnnnnnnnnnnnnnnnnnnnnnnnnnnnnnnnnnnnnnnnnnnnnnnnnnnnnnnnnnnnnnnnnnnnnnnnnnnnnnnnnnnnnnnnnnnnnnnnnnnnnnnnnnnnnnnnnnnnnnnnnnnnnnnnnnnnnnnnnnnnnnnnnnnnnnnnnnnnnnnnnnnnnnnnnnnnnnnnnnnnnnnnnnnnnnnnnnnnnnnnnnnnnnnnnnnnnnnnnnnnnnnnnnnnnnnnnnnnnnnnnnnnnnnnnnnnnnnnnnnnnnnnnnnnnnnnnnnnnnnnnnnnnnnnnnnnnnnnnnnnnnnnnnnnnnnnnnnnnnnnnnnnnnnnnnnnnnnnnnnnnnnnnnnnnnnnnnnnnnnnnnnnnnnnnnnnnnnnnnnnnnnnnnnnnnnnnnnnnnnnnnnnnnnnnnnnnnnnnnnnnnnnnnnnnnnnnnnnnnnnnnnnnnnnnnnnnnnnnnnnnnnnnnnnnnnnnnnnnnnnnnnnnnnnnnnnnnnnnnnnnnnnnnnnnnnnnnnnnnnnnnnnnnnnnnnnnnnnnnnnnnnnnnnnnnnnnnnnnnnnnnnnnnnnnnnnnnnnnnnnnnnnnnnnnnnnnnnnnnnnnnnnnnnnnnnnnnnnnnnnnnnnnnnnnnnnnnnnnnnnnnnnnnnnnnnnnnnnnnnnnnnnnnnnnnnnnnnnnnnnnnnnnnnnnnnnnnnnnnnnnnnnnnnnnnnnnnnnnnnnnnnnnnnnnnnnnnnnnnnnnnnnnnnnnnnnnnnnnnnnnnnnnnnnnnnnnnnnnnnnnnnnnnnnnnnnnnnnnnnnnnnnnnnnnnnnnnnnnnnnnnnnnnnnnnnnnnnnnnnnnnnnnnnnnnnnnnnnnnnnnnnnnnnnnnnnnnnnnnnnnnnnnnnnnnnnnnnnnnnnnnnnnnnnnnnnnnnnnnnnnnnnnnnnnnnnnnnnnnnnnnnnnnnnnnnnnnnnnnnnnnnnnnnnnnnnnnnnnnnnnnnnnnnnnnnnnnnnnnnnnnnnnnnnnnnnnnnnnnnnnnnnnnnnnnnnnnnnnnnnnnnnnnnnnnnnnnnnnnnnnnnnnnnnnnnnnnnnnnnnnnnnnnnnnnnnnnnnnnnnnnnnnnnnnnnnnnnnnnnnnnnnnnnnnnnnnnnnnnnnnnnnnnnnnnnnnnnnnnnnnnnnnnnnnnnnnnnnnnnnnnnnnnnnnnnnnnnnnnnnnnnnnnnnnnnnnnnnnnnnnnnnnnnnnnnnnnnnnnnnnnnnnnnnnnnnnnnnnnnnnnnnnnnnnnnnnnnnnnnnnnnnnnnnnnnnnnnnnnnnnnnnnnnnnnnnnnnnnnnnnnnnnnnnnnnnnnnnnnnnnnnnnnnnnnnnnnnnnnnnnnnnnnnnnnnnnnnnnnnnnnnnnnnnnnnnnnnnnnnnnnnnnnnnnnnnnnnnnnnnnnnnnnnnnnnnnnnnnnnnnnnnnnnnnnnnnnnnnnnnnnnnnnnnnnnnnnnnnnnnnnnnnnnnnnnnnnnnnnnnnnnnnnnnnnnnnnnnnnnnnnnnnnnnnnnnnnnnnnnnnnnnnnnnnnnnnnnnnnnnnnnnnnnnnnnnnnnnnnnnnnnnnnnnnnnnnnnnnnnnnnnnnnnnnnnnnnnnnnnnnnnnnnnnnnnnnnnnnnnnnnnnnnnnnnnnnnnnnnnnnnnnnnnnnnnnnnnnnnnnnnnnnnnnnnnnnnnnnnnnnnnnnnnnnnnnnnnnnnnnnnnnnnnnnnnnnnnnnnnnnnnnnnnnnnnnnnnnnnnnnnnnnnnnnnnnnnnnnnnnnnnnnnnnnnnnnnnnnnnnnnnnnnnnnnnnnnnnnnnnnnnnnnnnnnnnnnnnnnnnnnnnnnnnnnnnnnnnnnnnnnnnnnnnnnnnnnnnnnnnnnnnnnnnnnnnnnnnnnnnnnnnnnnnnnnnnnnnnnnnnnnnnnnnnnnnnnnnnnnnnnnnnnnnnnnnnnnnnnnnnnnnnnnnnnnnnnnnnnnnnnnnnnnnnnnnnnnnnnnnnnnnnnnnnnnnnnnnnnnnnnnnnnnnnnnnnnnnnnnnnnnnnnnnnnnnnnnnnnnnnnnnnnnnnnnnnnnnnnnnnnnnnnnnnnnnnnnnnnnnnnnnnnnnnnnnnnnnnnnnnnnnnnnnnnnnnnnnnnnnnnnnnnnnnnnnnnnnnnnnnnnnnnnnnnnnnnnnnnnnnnnnnnnnnnnnnnnnnnnnnnnnnnnnnnnnnnnnnnnnnnnnnnnnnnnnnnnnnnnnnnnnnnnnnnnnnnnnnnnnnnnnnnnnnnnnnnnnnnnnnnnnnnnnnnnnnnnnnnnnnnnnnnnnnnnnnnnnnnnnnnnnnnnnnnnnnnnnnnnnnnnnnnnnnnnnnnnnnnnnnnnnnnnnnnnnnnnnnnnnnnnnnnnnnnnnnnnnnnnnnnnnnnnnnnnnnnnnnnnnnnnnnnnnnnnnnnnnnnnnnnnnnnnnnnnnnnnnnnnnnnnnnnnnnnnnnnnnnnnnnnnnnnnnnnnnnnnnnnnnnnnnnnnnnnnnnnnnnnnnnnnnnnnnnnnnnnnnnnnnnnnnnnnnnnnnnnnnnnnnnnnnnnnnnnnnnnnnnnnnnnnnnnnnnnnnnnnnnnnnnnnnnnnnnnnnnnnnnnnnnnnnnnnnnnnnnnnnnnnnnnnnnnnnnnnnnnnnnnnnnnnnnnnnnnnnnnnnnnnnnnnnnnnnnnnnnnnnnnnnnnnnnnnnnnnnnnnnnnnnnnnnnnnnnnnnnnnnnnnnnnnnnnnnnnnnnnnnnnnnnnnnnnnnnnnnnnnnnnnnnnnnnnnnnnnnnnnnnnnnnnnnnnnnnnnnnnnnnnnnnnnnnnnnnnnnnnnnnnnnnnnnnnnnnnnnnnnnnnnnnnnnnnnnnnnnnnnnnnnnnnnnnnnnnnnnnnnnnnnnnnnnnnnnnnnnnnnnnnnnnnnnnnnnnnnnnnnnnnnnnnnnnnnnnnnnnnnnnnnnnnnnnnnnnnnnnnnnnnnnnnnnnnnnnnnnnnnnnnnnnnnnnnnnnnnnnnnnnnnnnnnnnnnnnnnnnnnnnnnnnnnnnnnnnnnnnnnnnnnnnnnnnnnnnnnnnnnnnnnnnnnnnnnnnnnnnnnnnnnnnnnnnnnnnnnnnnnnnnnnnnnnnnnnnnnnnnnnnnnnnnnnnnnnnnnnnnnnnnnnnnnnnnnnnnnnnnnnnnnnnnnnnnnnnnnnnnnnnnnnnnnnnnnnnnnnnnnnnnnnnnnnnnnnnnnnnnnnnnnnnnnnnnnnnnnnnnnnnnnnnnnnnnnnnnnnnnnnnnnnnnnnnnnnnnnnnnnnnnnnnnnnnnnnnnnnnnnnnnnnnnnnnnnnnnnnnnnnnnnnnnnnnnnnnnnnnnnnnnnnnnnnnnnnnnnnnnnnnnnnnnnnnnnnnnnnnnnnnnnnnnnnnnnnnnnnnnnnnnnnnnnnnnnnnnnnnnnnnnnnnnnnnnnnnnnnnnnnnnnnnnnnnnnnnnnnnnnnnnnnnnnnnnnnnnnnnnnnnnnnnnnnnnnnnnnnnnnnnnnnnnnnnnnnnnnnnnnnnnnnnnnnnnnnnnnnnnnnnnnnnnnnnnnnnnnnnnnnnnnnnnnnnnnnnnnnnnnnnnnnnnnnnnnnnnnnnnnnnnnnnnnnnnnnnnnnnnnnnnnnnnnnnnnnnnnnnnnnnnnnnnnnnnnnnnnnnnnnnnnnnnnnnnnnnnnnnnnnnnnnnnnnnnnnnnnnnnnnnnnnnnnnnnnnnnnnnnnnnnnnnnnnnnnnnnnnnnnnnnnnnnnnnnnnnnnnnnnnnnnnnnnnnnnnnnnnnnnnnnnnnnnnnnnnnnnnnnnnnnnnnnnnnnnnnnnnnnnnnnnnnnnnnnnnnnnnnnnnnnnnnnnnnnnnnnnnnnnnnnnnnnnnnnnnnnnnnnnnnnnnnnnnnnnnnnnnnnnnnnnnnnnnnnnnnnnnnnnnnnnnnnnnnnnnnnnnnnnnnnnnnnnnnnnnnnnnnnnnnnnnnnnnnnnnnnnnnnnnnnnnnnnnnnnnnnnnnnnnnnnnnnnnnnnnnnnnnnnnnnnnnnnnnnnnnnnnnnnnnnnnnnnnnnnnnnnnnnnnnnnnnnnnnnnnnnnnnnnnnnnnnnnnnnnnnnnnnnnnnnnnnnnnnnnnnnnnnnnnnnnnnnnnnnnnnnnnnnnnnnnnnnnnnnnnnnnnnnnnnnnnnnnnnnnnnnnnnnnnnnnnnnnnnnnnnnnnnnnnnnnnnnnnnnnnnnnnnnnnnnnnnnnnnnnnnnnnnnnnnnnnnnnnnnnnnnnnnnnnnnnnnnnnnnnnnnnnnnnnnnnnnnnnnnnnnnnnnnnnnnnnnnnnnnnnnnnnnnnnnnnnnnnnnnnnnnnnnnnnnnnnnnnnnnnnnnnnnnnnnnnnnnnnnnnnnnnnnnnnnnnnnnnnnnnnnnnnnnnnnnnnnnnnnnnnnnnnnnnnnnnnnnnnnnnnnnnnnnnnnnnnnnnnnnnnnnnnnnnnnnnnnnnnnnnnnnnnnnnnnnnnnnnnnnnnnnnnnnnnnnnnnnnnnnnnnnnnnnnnnnnnnnnnnnnnnnnnnnnnnnnnnnnnnnnnnnnnnnnnnnnnnnnnnnnnnnnnnnnnnnnnnnnnnnnnnnnnnnnnnnnnnnnnnnnnnnnnnnnnnnnnnnnnnnnnnnnnnnnnnnnnnnnnnnnnnnnnnnnnnnnnnnnnnnnnnnnnnnnnnnnnnnnnnnnnnnnnnnnnnnnnnnnnnnnnnnnnnnnnnnnnnnnnnnnnnnnnnnnnnnnnnnnnnnnnnnnnnnnnnnnnnnnnnnnnnnnnnnnnnnnnnnnnnnnnnnnnnnnnnnnnnnnnnnnnnnnnnnnnnnnnnnnnnnnnnnnnnnnnnnnnnnnnnnnnnnnnnnnnnnnnnnnnnnnnnnnnnnnnnnnnnnnnnnnnnnnnnnnnnnnnnnnnnnnnnnnnnnnnnnnnnnnnnnnnnnnnnnnnnnnnnnnnnnnnnnnnnnnnnnnnnnnnnnnnnnnnnnnnnnnnnnnnnnnnnnnnnnnnnnnnnnnnnnnnnnnnnnnnnnnnnnnnnnnnnnnnnnnnnnnnnnnnnnnnnnnnnnnnnnnnnnnnnnnnnnnnnnnnnnnnnnnnnnnnnnnnnnnnnnnnnnnnnnnnnnnnnnnnnnnnnnnnnnnnnnnnnnnnnnnnnnnnnnnnnnnnnnnnnnnnnnnnnnnnnnnnnnnnnnnnnnnnnnnnnnnnnnnnnnnnnnnnnnnnnnnnnnnnnnnnnnnnnnnnnnnnnnnnnnnnnnnnnnnnnnnnnnnnnnnnnnnnnnnnnnnnnnnnnnnnnnnnnnnnnnnnnnnnnnnnnnnnnnnnnnnnnnnnnnnnnnnnnnnnnnnnnnnnnnnnnnnnnnnnnnnnnnnnnnnnnnnnnnnnnnnnnnnnnnnnnnnnnnnnnnnnnnnnnnnnnnnnnnnnnnnnnnnnnnnnnnnnnnnnnnnnnnnnnnnnnnnnnnnnnnnnnnnnnnnnnnnnnnnnnnnnnnnnnnnnnnnnnnnnnnnnnnnnnnnnnnnnnnnnnnnnnnnnnnnnnnnnnnnnnnnnnnnnnnnnnnnnnnnnnnnnnnnnnnnnnnnnnnnnnnnnnnnnnnnnnnnnnnnnnnnnnnnnnnnnnnnnnnnnnnnnnnnnnnnnnnnnnnnnnnnnnnnnnnnnnnnnnnnnnnnnnnnnnnnnnnnnnnnnnnnnnnnnnnnnnnnnnnnnnnnnnnnnnnnnnnnnnnnnnnnnnnnnnnnnnnnnnnnnnnnnnnnnnnnnnnnnnnnnnnnnnnnnnnnnnnnnnnnnnnnnnnnnnnnnnnnnnnnnnnnnnnnnnnnnnnnnnnnnnnnnnnnnnnnnnnnnnnnnnnnnnnnnnnnnnnnnnnnnnnnnnnnnnnnnnnnnnnnnnnnnnnnnnnnnnnnnnnnnnnnnnnnnnnnnnnnnnnnnnnnnnnnnnnnnnnnnnnnnnnnnnnnnnnnnnnnnnnnnnnnnnnnnnnnnnnnnnnnnnnnnnnnnnnnnnnnnnnnnnnnnnnnnnnnnnnnnnnnnnnnnnnnnnnnnnnnnnnnnnnnnnnnnnnnnnnnnnnnnnnnnnnnnnnnnnnnnnnnnnnnnnnnnnnnnnnnnnnnnnnnnnnnnnnnnnnnnnnnnnnnnnnnnnnnnnnnnnnnnnnnnnnnnnnnnnnnnnnnnnnnnnnnnnnnnnnnnnnnnnnnnnnnnnnnnnnnnnnnnnnnnnnnnnnnnnnnnnnnnnnnnnnnnnnnnnnnnnnnnnnnnnnnnnnnnnnnnnnnnnnnnnnnnnnnnnnnnnnnnnnnnnnnnnnnnnnnnnnnnnnnnnnnnnnnnnnnnnnnnnnnnnnnnnnnnnnnnnnnnnnnnnnnnnnnnnnnnnnnnnnnnnnnnnnnnnnnnnnnnnnnnnnnnnnnnnnnnnnnnnnnnnnnnnnnnnnnnnnnnnnnnnnnnnnnnnnnnnnnnnnnnnnnnnnnnnnnnnnnnnnnnnnnnnnnnnnnnnnnnnnnnnnnnnnnnnnnnnnnnnnnnnnnnnnnnnnnnnnnnnnnnnnnnnnnnnnnnnnnnnnnnnnnnnnnnnnnnnnnnnnnnnnnnnnnnnnnnnnnnnnnnnnnnnnnnnnnnnnnnnnnnnnnnnnnnnnnnnnnnnnnnnnnnnnnnnnnnnnnnnnnnnnnnnnnnnnnnnnnnnnnnnnnnnnnnnnnnnnnnnnnnnnnnnnnnnnnnnnnnnnnnnnnnnnnnnnnnnnnnnnnnnnnnnnnnnnnnnnnnnnnnnnnnnnnnnnnnnnnnnnnnnnnnnnnnnnnnnnnnnnnnnnnnnnnnnnnnnnnnnnnnnnnnnnnnnnnnnnnnnnnnnnnnnnnnnnnnnnnnnnnnnnnnnnnnnnnnnnnnnnnnnnnnnnnnnnnnnnnnnnnnnnnnnnnnnnnnnnnnnnnnnnnnnnnnnnnnnnnnnnnnnnnnnnnnnnnnnnnnnnnnnnnnnnnnnnnnnnnnnnnnnnnnnnnnnnnnnnnnnnnnnnnnnnnnnnnnnnnnnnnnnnnnnnnnnnnnnnnnnnnnnnnnnnnnnnnnnnnnnnnnnnnnnnnnnnnnnnnnnnnnnnnnnnnnnnnnnnnnnnnnnnnnnnnnnnnnnnnnnnnnnnnnnnnnnnnnnnnnnnnnnnnnnnnnnnnnnnnnnnnnnnnnnnnnnnnnnnnnnnnnnnnnnnnnnnnnnnnnnnnnnnnnnnnnnnnnnnnnnnnnnnnnnnnnnnnnnnnnnnnnnnnnnnnnnnnnnnnnnnnnnnnnnnnnnnnnnnnnnnnnnnnnnnnnnnnnnnnnnnnnnnnnnnnnnnnnnnnnnnnnnnnnnnnnnnnnnnnnnnnnnnnnnnnnnnnnnnnnnnnnnnnnnnnnnnnnnnnnnnnnnnnnnnnnnnnnnnnnnnnnnnnnnnnnnnnnnnnnnnnnnnnnnnnnnnnnnnnnnnnnnnnnnnnnnnnnnnnnnnnnnnnnnnnnnnnnnnnnnnnnnnnnnnnnnnnnnnnnnnnnnnnnnnnnnnnnnnnnnnnnnnnnnnnnnnnnnnnnnnnnnnnnnnnnnnnnnnnnnnnnnnnnnnnnnnnnnnnnnnnnnnnnnnnnnnnnnnnnnnnnnnnnnnnnnnnnnnnnnnnnnnnnnnnnnnnnnnnnnnnnnnnnnnnnnnnnnnnnnnnnnnnnnnnnnnnnnnnnnnnnnnnnnnnnnnnnnnnnnnnnnnnnnnnnnnnnnnnnnnnnnnnnnnnnnnnnnnnnnnnnnnnnnnnnnnnnnnnnnnnnnnnnnnnnnnnnnnnnnnnnnnnnnnnnnnnnnnnnnnnnnnnnnnnnnnnnnnnnnnnnnnnnnnnnnnnnnnnnnnnnnnnnnnnnnnnnnnnnnnnnnnnnnnnnnnnnnnnnnnnnnnnnnnnnnnnnnnnnnnnnnnnnnnnnnnnnnnnnnnnnnnnnnnnnnnnnnnnnnnnnnnnnnnnnnnnnnnnnnnnnnnnnnnnnnnnnnnnnnnnnnnnnnnnnnnnnnnnnnnnnnnnnnnnnnnnnnnnnnnnnnnnnnnnnnnnnnnnnnnnnnnnnnnnnnnnnnnnnnnnnnnnnnnnnnnnnnnnnnnnnnnnnnnnnnnnnnnnnnnnnnnnnnnnnnnnnnnnnnnnnnnnnnnnnnnnnnnnnnnnnnnnnnnnnnnnnnnnnnnnnnnnnnnnnnnnnnnnnnnnnnnnnnnnnnnnnnnnnnnnnnnnnnnnnnnnnnnnnnnnnnnnnnnnnnnnnnnnnnnnnnnnnnnnnnnnnnnnnnnnnnnnnnnnnnnnnnnnnnnnnnnnnnnnnnnnnnnnnnnnnnnnnnnnnnnnnnnnnnnnnnnnnnnnnnnnnnnnnnnnnnnnnnnnnnnnnnnnnnnnnnnnnnnnnnnnnnnnnnnnnnnnnnnnnnnnnnnnnnnnnnnnnnnnnnnnnnnnnnnnnnnnnnnnnnnnnnnnnnnnnnnnnnnnnnnnnnnnnnnnnnnnnnnnnnnnnnnnnnnnnnnnnnnnnnnnnnnnnnnnnnnnnnnnnnnnnnnnnnnnnnnnnnnnnnnnnnnnnnnnnnnnnnnnnnnnnnnnnnnnnnnnnnnnnnnnnnnnnnnnnnnnnnnnnnnnnnnnnnnnnnnnnnnnnnnnnnnnnnnnnnnnnnnnnnnnnnnnnnnnnnnnnnnnnnnnnnnnnnnnnnnnnnnnnnnnnnnnnnnnnnnnnnnnnnnnnnnnnnnnnnnnnnnnnnnnnnnnnnnnnnnnnnnnnnnnnnnnnnnnnnnnnnnnnnnnnnnnnnnnnnnnnnnnnnnnnnnnnnnnnnnnnnnnnnnnnnnnnnnnnnnnnnnnnnnnnnnnnnnnnnnnnnnnnnnnnnnnnnnnnnnnnnnnnnnnnnnnnnnnnnnnnnnnnnnnnnnnnnnnnnnnnnnnnnnnnnnnnnnnnnnnnnnnnnnnnnnnnnnnnnnnnnnnnnnnnnnnnnnnnnnnnnnnnnnnnnnnnnnnnnnnnnnnnnnnnnnnnnnnnnnnnnnnnnnnnnnnnnnnnnnnnnnnnnnnnnnnnnnnnnnnnnnnnnnnnnnnnnnnnnnnnnnnnnnnnnnnnnnnnnnnnnnnnnnnnnnnnnnnnnnnnnnnnnnnnnnnnnnnnnnnnnnnnnnnnnnnnnnnnnnnnnnnnnnnnnnnnnnnnnnnnnnnnnnnnnnnnnnnnnnnnnnnnnnnnnnnnnnnnnnnnnnnnnnnnnnnnnnnnnnnnnnnnnnnnnnnnnnnnnnnnnnnnnnnnnnnnnnnnnnnnnnnnnnnnnnnnnnnnnnnnnnnnnnnnnnnnnnnnnnnnnnnnnnnnnnnnnnnnnnnnnnnnnnnnnnnnnnnnnnnnnnnnnnnnnnnnnnnnnnnnnnnnnnnnnnnnnnnnnnnnnnnnnnnnnnnnnnnnnnnnnnnnnnnnnnnnnnnnnnnnnnnnnnnnnnnnnnnnnnnnnnnnnnnnnnnnnnnnnnnnnnnnnnnnnnnnnnnnnnnnnnnnnnnnnnnnnnnnnnnnnnnnnnnnnnnnnnnnnnnnnnnnnnnnnnnnnnnnnnnnnnnnnnnnnnnnnnnnnnnnnnnnnnnnnnnnnnnnnnnnnnnnnnnnnnnnnnnnnnnnnnnnnnnnnnnnnnnnnnnnnnnnnnnnnnnnnnnnnnnnnnnnnnnnnnnnnnnnnnnnnnnnnnnnnnnnnnnnnnnnnnnnnnnnnnnnnnnnnnnnnnnnnnnnnnnnnnnnnnnnnnnnnnnnnnnnnnnnnnnnnnnnnnnnnnnnnnnnnnnnnnnnnnnnnnnnnnnnnnnnnnnnnnnnnnnnnnnnnnnnnnnnnnnnnnnnnnnnnnnnnnnnnnnnnnnnnnnnnnnnnnnnnnnnnnnnnnnnnnnnnnnnnnnnnnnnnnnnnnnnnnnnnnnnnnnnnnnnnnnnnnnnnnnnnnnnnnnnnnnnnnnnnnnnnnnnnnnnnnnnnnnnnnnnnnnnnnnnnnnnnnnnnnnnnnnnnnnnnnnnnnnnnnnnnnnnnnnnnnnnnnnnnnnnnnnnnnnnnnnnnnnnnnnnnnnnnnnnnnnnnnnnnnnnnnnnnnnnnnnnnnnnnnnnnnnnnnnnnnnnnnnnnnnnnnnnnnnnnnnnnnnnnnnnnnnnnnnnnnnnnnnnnnnnnnnnnnnnnnnnnnnnnnnnnnnnnnnnnnnnnnnnnnnnnnnnnnnnnnnnnnnnnnnnnnnnnnnnnnnnnnnnnnnnnnnnnnnnnnnnnnnnnnnnnnnnnnnnnnnnnnnnnnnnnnnnnnnnnnnnnnnnnnnnnnnnnnnnnnnnnnnnnnnnnnnnnnnnnnnnnnnnnnnnnnnnnnnnnnnnnnnnnnnnnnnnnnnnnnnnnnnnnnnnnnnnnnnnnnnnnnnnnnnnnnnnnnnnnnnnnnnnnnnnnnnnnnnnnnnnnnnnnnnnnnnnnnnnnnnnnnnnnnnnnnnnnnnnnnnnnnnnnnnnnnnnnnnnnnnnnnnnnnnnnnnnnnnnnnnnnnnnnnnnnnnnnnnnnnnnnnnnnnnnnnnnnnnnnnnnnnnnnnnnnnnnnnnnnnnnnnnnnnnnnnnnnnnnnnnnnnnnnnnnnnnnnnnnnnnnnnnnnnnnnnnnnnnnnnnnnnnnnnnnnnnnnnnnnnnnnnnnnnnnnnnnnnnnnnnnnnnnnnnnnnnnnnnnnnnnnnnnnnnnnnnnnnnnnnnnnnnnnnnnnnnnnnnnnnnnnnnnnnnnnnnnnnnnnnnnnnnnnnnnnnnnnnnnnnnnnnnnnnnnnnnnnnnnnnnnnnnnnnnnnnnnnnnnnnnnnnnnnnnnnnnnnnnnnnnnnnnnnnnnnnnnnnnnnnnnnnnnnnnnnnnnnnnnnnnnnnnnnnnnnnnnnnnnnnnnnnnnnnnnnnnnnnnnnnnnnnnnnnnnnnnnnnnnnnnnnnnnnnnnnnnnnnnnnnnnnnnnnnnnnnnnnnnnnnnnnnnnnnnnnnnnnnnnnnnnnnnnnnnnnnnnnnnnnnnnnnnnnnnnnnnnnnnnnnnnnnnnnnnnnnnnnnnnnnnnnnnnnnnnnnnnnnnnnnnnnnnnnnnnnnnnnnnnnnnnnnnnnnnnnnnnnnnnnnnnnnnnnnnnnnnnnnnnnnnnnnnnnnnnnnnnnnnnnnnnnnnnnnnnnnnnnnnnnnnnnnnnnnnnnnnnnnnnnnnnnnnnnnnnnnnnnnnnnnnnnnnnnnnnnnnnnnnnnnnnnnnnnnnnnnnnnnnnnnnnnnnnnnnnnnnnnnnnnnnnnnnnnnnnnnnnnnnnnnnnnnnnnnnnnnnnnnnnnnnnnnnnnnnnnnnnnnnnnnnnnnnnnnnnnnnnnnnnnnnnnnnnnnnnnnnnnnnnnnnnnnnnnnnnnnnnnnnnnnnnnnnnnnnnnnnnnnnnnnnnnnnnnnnnnnnnnnnnnnnnnnnnnnnnnnnnnnnnnnnnnnnnnnnnnnnnnnnnnnnnnnnnnnnnnnnnnnnnnnnnnnnnnnnnnnnnnnnnnnnnnnnnnnnnnnnnnnnnnnnnnnnnnnnnnnnnnnnnnnnnnnnnnnnnnnnnnnnnnnnnnnnnnnnnnnnnnnnnnnnnnnnnnnnnnnnnnnnnnnnnnnnnnnnnnnnnnnnnnnnnnnnnnnnnnnnnnnnnnnnnnnnnnnnnnnnnnnnnnnnnnnnnnnnnnnnnnnnnnnnnnnnnnnnnnnnnnnnnnnnnnnnnnnnnnnnnnnnnnnnnnnnnnnnnnnnnnnnnnnnnnnnnnnnnnnnnnnnnnnnnnnnnnnnnnnnnnnnnnnnnnnnnnnnnnnnnnnnnnnnnnnnnnnnnnnnnnnnnnnnnnnnnnnnnnnnnnnnnnnnnnnnnnnnnnnnnnnnnnnnnnnnnnnnnnnnnnnnnnnnnnnnnnnnnnnnnnnnnnnnnnnnnnnnnnnnnnnnnnnnnnnnnnnnnnnnnnnnnnnnnnnnnnnnnnnnnnnnnnnnnnnnnnnnnnnnnnnnnnnnnnnnnnnnnnnnnnnnnnnnnnnnnnnnnnnnnnnnnnnnnnnnnnnnnnnnnnnnnnnnnnnnnnnnnnnnnnnnnnnnnnnnnnnnnnnnnnnnnnnnnnnnnnnnnnnnnnnnnnnnnnnnnnnnnnnnnnnnnnnnnnnnnnnnnnnnnnnnnnnnnnnnnnnnnnnnnnnnnnnnnnnnnnnnnnnnnnnnnnnnnnnnnnnnnnnnnnnnnnnnnnnnnnnnnnnnnnnnnnnnnnnnnnnnnnnnnnnnnnnnnnnnnnnnnnnnnnnnnnnnnnnnnnnnnnnnnnnnnnnnnnnnnnnnnnnnnnnnnnnnnnnnnnnnnnnnnnnnnnnnnnnnnnnnnnnnnnnnnnnnnnnnnnnnnnnnnnnnnnnnnnnnnnnnnnnnnnnnnnnnnnnnnnnnnnnnnnnnnnnnnnnnnnnnnnnnnnnnnnnnnnnnnnnnnnnnnnnnnnnnnnnnnnnnnnnnnnnnnnnnnnnnnnnnnnnnnnnnnnnnnnnnnnnnnnnnnnnnnnnnnnnnnnnnnnnnnnnnnnnnnnnnnnnnnnnnnnnnnnnnnnnnnnnnnnnnnnnnnnnnnnnnnnnnnnnnnnnnnnnnnnnnnnnnnnnnnnnnnnnnnnnnnnnnnnnnnnnnnnnnnnnnnnnnnnnnnnnnnnnnnnnnnnnnnnnnnnnnnnnnnnnnnnnnnnnnnnnnnnnnnnnnnnnnnnnnnnnnnnnnnnnnnnnnnnnnnnnnnnnnnnnnnnnnnnnnnnnnnnnnnnnnnnnnnnnnnnnnnnnnnnnnnnnnnnnnnnnnnnnnnnnnnnnnnnnnnnnnnnnnnnnnnnnnnnnnnnnnnnnnnnnnnnnnnnnnnnnnnnnnnnnnnnnnnnnnnnnnnnnnnnnnnnnnnnnnnnnnnnnnnnnnnnnnnnnnnnnnnnnnnnnnnnnnnnnnnnnnnnnnnnnnnnnnnnnnnnnnnnnnnnnnnnnnnnnnnnnnnnnnnnnnnnnnnnnnnnnnnnnnnnnnnnnnnnnnnnnnnnnnnnnnnnnnnnnnnnnnnnnnnnnnnnnnnnnnnnnnnnnnnnnnnnnnnnnnnnnnnnnnnnnnnnnnnnnnnnnnnnnnnnnnnnnnnnnnnnnnnnnnnnnnnnnnnnnnnnnnnnnnnnnnnnnnnnnnnnnnnnnnnnnnnnnnnnnnnnnnnnnnnnnnnnnnnnnnnnnnnnnnnnnnnnnnnnnnnnnnnnnnnnnnnnnnnnnnnnnnnnnnnnnnnnnnnnnnnnnnnnnnnnnnnnnnnnnnnnnnnnnnnnnnnnnnnnnnnnnnnnnnnnnnnnnnnnnnnnnnnnnnnnnnnnnnnnnnnnnnnnnnnnnnnnnnnnnnnnnnnnnnnnnnnnnnnnnnnnnnnnnnnnnnnnnnnnnnnnnnnnnnnnnnnnnnnnnnnnnnnnnnnnnnnnnnnnnnnnnnnnnnnnnnnnnnnnnnnnnnnnnnnnnnnnnnnnnnnnnnnnnnnnnnnnnnnnnnnnnnnnnnnnnnnnnnnnnnnnnnnnnnnnnnnnnnnnnnnnnnnnnnnnnnnnnnnnnnnnnnnnnnnnnnnnnnnnnnnnnnnnnnnnnnnnnnnnnnnnnnnnnnnnnnnnnnnnnnnnnnnnnnnnnnnnnnnnnnnnnnnnnnnnnnnnnnnnnnnnnnnnnnnnnnnnnnnnnnnnnnnnnnnnnnnnnnnnnnnnnnnnnnnnnnnnnnnnnnnnnnnnnnnnnnnnnnnnnnnnnnnnnnnnnnnnnnnnnnnnnnnnnnnnnnnnnnnnnnnnnnnnnnnnnnnnnnnnnnnnnnnnnnnnnnnnnnnnnnnnnnnnnnnnnnnnnnnnnnnnnnnnnnnnnnnnnnnnnnnnnnnnnnnnnnnnnnnnnnnnnnnnnnnnnnnnnnnnnnnnnnnnnnnnnnnnnnnnnnnnnnnnnnnnnnnnnnnnnnnnnnnnnnnnnnnnnnnnnnnnnnnnnnnnnnnnnnnnnnnnnnnnnnnnnnnnnnnnnnnnnnnnnnnnnnnnnnnnnnnnnnnnnnnnnnnnnnnnnnnnnnnnnnnnnnnnnnnnnnnnnnnnnnnnnnnnnnnnnnnnnnnnnnnnnnnnnnnnnnnnnnnnnnnnnnnnnnnnnnnnnnnnnnnnnnnnnnnnnnnnnnnnnnnnnnnnnnnnnnnnnnnnnnnnnnnnnnnnnnnnnnnnnnnnnnnnnnnnnnnnnnnnnnnnnnnnnnnnnnnnnnnnnnnnnnnnnnnnnnnnnnnnnnnnnnnnnnnnnnnnnnnnnnnnnnnnnnnnnnnnnnnnnnnnnnnnnnnnnnnnnnnnnnnnnnnnnnnnnnnnnnnnnnnnnnnnnnnnnnnnnnnnnnnnnnnnnnnnnnnnnnnnnnnnnnnnnnnnnnnnnnnnnnnnnnnnnnnnnnnnnnnnnnnnnnnnnnnnnnnnnnnnnnnnnnnnnnnnnnnnnnnnnnnnnnnnnnnnnnnnnnnnnnnnnnnnnnnnnnnnnnnnnnnnnnnnnnnnnnnnnnnnnnnnnnnnnnnnnnnnnnnnnnnnnnnnnnnnnnnnnnnnnnnnnnnnnnnnnnnnnnnnnnnnnnnnnnnnnnnnnnnnnnnnnnnnnnnnnnnnnnnnnnnnnnnnnnnnnnnnnnnnnnnnnnnnnnnnnnnnnnnnnnnnnnnnnnnnnnnnnnnnnnnnnnnnnnnnnnnnnnnnnnnnnnnnnnnnnnnnnnnnnnnnnnnnnnnnnnnnnnnnnnnnnnnnnnnnnnnnnnnnnnnnnnnnnnnnnnnnnnnnnnnnnnnnnnnnnnnnnnnnnnnnnnnnnnnnnnnnnnnnnnnnnnnnnnnnnnnnnnnnnnnnnnnnnnnnnnnnnnnnnnnnnnnnnnnnnnnnnnnnnnnnnnnnnnnnnnnnnnnnnnnnnnnnnnnnnnnnnnnnnnnnnnnnnnnnnnnnnnnnnnnnnnnnnnnnnnnnnnnnnnnnnnnnnnnnnnnnnnnnnnnnnnnnnnnnnnnnnnnnnnnnnnnnnnnnnnnnnnnnnnnnnnnnnnnnnnnnnnnnnnnnnnnnnnnnnnnnnnnnnnnnnnnnnnnnnnnnnnnnnnnnnnnnnnnnnnnnnnnnnnnnnnnnnnnnnnnnnnnnnnnnnnnnnnnnnnnnnnnnnnnnnnnnnnnnnnnnnnnnnnnnnnnnnnnnnnnnnnnnnnnnnnnnnnnnnnnnnnnnnnnnnnnnnnnnnnnnnnnnnnnnnnnnnnnnnnnnnnnnnnnnnnnnnnnnnnnnnnnnnnnnnnnnnnnnnnnnnnnnnnnnnnnnnnnnnnnnnnnnnnnnnnnnnnnnnnnnnnnnnnnnnnnnnnnnnnnnnnnnnnnnnnnnnnnnnnnnnnnnnnnnnnnnnnnnnnnnnnnnnnnnnnnnnnnnnnnnnnnnnnnnnnnnnnnnnnnnnnnnnnnnnnnnnnnnnnnnnnnnnnnnnnnnnnnnnnnnnnnnnnnnnnnnnnnnnnnnnnnnnnnnnnnnnnnnnnnnnnnnnnnnnnnnnnnnnnnnnnnnnnnnnnnnnnnnnnnnnnnnnnnnnnnnnnnnnnnnnnnnnnnnnnnnnnnnnnnnnnnnnnnnnnnnnnnnnnnnnnnnnnnnnnnnnnnnnnnnnnnnnnnnnnnnnnnnnnnnnnnnnnnnnnnnnnnnnnnnnnnnnnnnnnnnnnnnnnnnnnnnnnnnnnnnnnnnnnnnnnnnnnnnnnnnnnnnnnnnnnnnnnnnnnnnnnnnnnnnnnnnnnnnnnnnnnnnnnnnnnnnnnnnnnnnnnnnnnnnnnnnnnnnnnnnnnnnnnnnnnnnnnnnnnnnnnnnnnnnnnnnnnnnnnnnnnnnnnnnnnnnnnnnnnnnnnnnnnnnnnnnnnnnnnnnnnnnnnnnnnnnnnnnnnnnnnnnnnnnnnnnnnnnnnnnnnnnnnnnnnnnnnnnnnnnnnnnnnnnnnnnnnnnnnnnnnnnnnnnnnnnnnnnnnnnnnnnnnnnnnnnnnnnnnnnnnnnnnnnnnnnnnnnnnnnnnnnnnnnnnnnnnnnnnnnnnnnnnnnnnnnnnnnnnnnnnnnnnnnnnnnnnnnnnnnnnnnnnnnnnnnnnnnnnnnnnnnnnnnnnnnnnnnnnnnnnnnnnnnnnnnnnnnnnnnnnnnnnnnnnnnnnnnnnnnnnnnnnnnnnnnnnnnnnnnnnnnnnnnnnnnnnnnnnnnnnnnnnnnnnnnnnnnnnnnnnnnnnnnnnnnnnnnnnnnnnnnnnnnnnnnnnnnnnnnnnnnnnnnnnnnnnnnnnnnnnnnnnnnnnnnnnnnnnnnnnnnnnnnnnnnnnnnnnnnnnnnnnnnnnnnnnnnnnnnnnnnnnnnnnnnnnnnnnnnnnnnnnnnnnnnnnnnnnnnnnnnnnnnnnnnnnnnnnnnnnnnnnnnnnnnnnnnnnnnnnnnnnnnnnnnnnnnnnnnnnnnnnnnnnnnnnnnnnnnnnnnnnnnnnnnnnnnnnnnnnnnnnnnnnnnnnnnnnnnnnnnnnnnnnnnnnnnnnnnnnnnnnnnnnnnnnnnnnnnnnnnnnnnnnnnnnnnnnnnnnnnnnnnnnnnnnnnnnnnnnnnnnnnnnnnnnnnnnnnnnnnnnnnnnnnnnnnnnnnnnnnnnnnnnnnnnnnnnnnnnnnnnnnnnnnnnnnnnnnnnnnnnnnnnnnnnnnnnnnnnnnnnnnnnnnnnnnnnnnnnnnnnnnnnnnnnnnnnnnnnnnnnnnnnnnnnnnnnnnnnnnnnnnnnnnnnnnnnnnnnnnnnnnnnnnnnnnnnnnnnnnnnnnnnnnnnnnnnnnnnnnnnnnnnnnnnnnnnnnnnnnnnnnnnnnnnnnnnnnnnnnnnnnnnnnnnnnnnnnnnnnnnnnnnnnnnnnnnnnnnnnnnnnnnnnnnnnnnnnnnnnnnnnnnnnnnnnnnnnnnnnnnnnnnnnnnnnnnnnnnnnnnnnnnnnnnnnnnnnnnnnnnnnnnnnnnnnnnnnnnnnnnnnnnnnnnnnnnnnnnnnnnnnnnnnnnnnnnnnnnnnnnnnnnnnnnnnnnnnnnnnnnnnnnnnnnnnnnnnnnnnnnnnnnnnnnnnnnnnnnnnnnnnnnnnnnnnnnnnnnnnnnnnnnnnnnnnnnnnnnnnnnnnnnnnnnnnnnnnnnnnnnnnnnnnnnnnnnnnnnnnnnnnnnnnnnnnnnnnnnnnnnnnnnnnnnnnnnnnnnnnnnnnnnnnnnnnnnnnnnnnnnnnnnnnnnnnnnnnnnnnnnnnnnnnnnnnnnnnnnnnnnnnnnnnnnnnnnnnnnnnnnnnnnnnnnnnnnnnnnnnnnnnnnnnnnnnnnnnnnnnnnnnnnnnnnnnnnnnnnnnnnnnnnnnnnnnnnnnnnnnnnnnnnnnnnnnnnnnnnnnnnnnnnnnnnnnnnnnnnnnnnnnnnnnnnnnnnnnnnnnnnnnnnnnnnnnnnnnnnnnnnnnnnnnnnnnnnnnnnnnnnnnnnnnnnnnnnnnnnnnnnnnnnnnnnnnnnnnnnnnnnnnnnnnnnnnnnnnnnnnnnnnnnnnnnnnnnnnnnnnnnnnnnnnnnnnnnnnnnnnnnnnnnnnnnnnnnnnnnnnnnnnnnnnnnnnnnnnnnnnnnnnnnnnnnnnnnnnnnnnnnnnnnnnnnnnnnnnnnnnnnnnnnnnnnnnnnnnnnnnnnnnnnnnnnnnnnnnnnnnnnnnnnnnnnnnnnnnnnnnnnnnnnnnnnnnnnnnnnnnnnnnnnnnnnnnnnnnnnnnnnnnnnnnnnnnnnnnnnnnnnnnnnnnnnnnnnnnnnnnnnnnnnnnnnnnnnnnnnnnnnnnnnnnnnnnnnnnnnnnnnnnnnnnnnnnnnnnnnnnnnnnnnnnnnnnnnnnnnnnnnnnnnnnnnnnnnnnnnnnnnnnnnnnnnnnnnnnnnnnnnnnnnnnnnnnnnnnnnnnnnnnnnnnnnnnnnnnnnnnnnnnnnnnnnnnnnnnnnnnnnnnnnnnnnnnnnnnnnnnnnnnnnnnnnnnnnnnnnnnnnnnnnnnnnnnnnnnnnnnnnnnnnnnnnnnnnnnnnnnnnnnnnnnnnnnnnnnnnnnnnnnnnnnnnnnnnnnnnnnnnnnnnnnnnnnnnnnnnnnnnnnnnnnnnnnnnnnnnnnnnnnnnnnnnnnnnnnnnnnnnnnnnnnnnnnnnnnnnnnnnnnnnnnnnnnnnnnnnnnnnnnnnnnnnnnnnnnnnnnnnnnnnnnnnnnnnnnnnnnnnnnnnnnnnnnnnnnnnnnnnnnnnnnnnnnnnnnnnnnnnnnnnnnnnnnnnnnnnnnnnnnnnnnnnnnnnnnnnnnnnnnnnnnnnnnnnnnnnnnnnnnnnnnnnnnnnnnnnnnnnnnnnnnnnnnnnnnnnnnnnnnnnnnnnnnnnnnnnnnnnnnnnnnnnnnnnnnnnnnnnnnnnnnnnnnnnnnnnnnnnnnnnnnnnnnnnnnnnnnnnnnnnnnnnnnnnnnnnnnnnnnnnnnnnnnnnnnnnnnnnnnnnnnnnnnnnnnnnnnnnnnnnnnnnnnnnnnnnnnnnnnnnnnnnnnnnnnnnnnnnnnnnnnnnnnnnnnnnnnnnnnnnnnnnnnnnnnnnnnnnnnnnnnnnnnnnnnnnnnnnnnnnnnnnnnnnnnnnnnnnnnnnnnnnnnnnnnnnnnnnnnnnnnnnnnnnnnnnnnnnnnnnnnnnnnnnnnnnnnnnnnnnnnnnnnnnnnnnnnnnnnnnnnnnnnnnnnnnnnnnnnnnnnnnnnnnnnnnnnnnnnnnnnnnnnnnnnnnnnnnnnnnnnnnnnnnnnnnnnnnnnnnnnnnnnnnnnnnnnnnnnnnnnnnnnnnnnnnnnnnnnnnnnnnnnnnnnnnnnnnnnnnnnnnnnnnnnnnnnnnnnnnnnnnnnnnnnnnnnnnnnnnnnnnnnnnnnnnnnnnnnnnnnnnnnnnnnnnnnnnnnnnnnnnnnnnnnnnnnnnnnnnnnnnnnnnnnnnnnnnnnnnnnnnnnnnnnnnnnnnnnnnnnnnnnnnnnnnnnnnnnnnnnnnnnnnnnnnnnnnnnnnnnnnnnnnnnnnnnnnnnnnnnnnnnnnnnnnnnnnnnnnnnnnnnnnnnnnnnnnnnnnnnnnnnnnnnnnnnnnnnnnnnnnnnnnnnnnnnnnnnnnnnnnnnnnnnnnnnnnnnnnnnnnnnnnnnnnnnnnnnnnnnnnnnnnnnnnnnnnnnnnnnnnnnnnnnnnnnnnnnnnnnnnnnnnnnnnnnnnnnnnnnnnnnnnnnnnnnnnnnnnnnnnnnnnnnnnnnnnnnnnnnnnnnnnnnnnnnnnnnnnnnnnnnnnnnnnnnnnnnnnnnnnnnnnnnnnnnnnnnnnnnnnnnnnnnnnnnnnnnnnnnnnnnnnnnnnnnnnnnnnnnnnnnnnnnnnnnnnnnnnnnnnnnnnnnnnnnnnnnnnnnnnnnnnnnnnnnnnnnnnnnnnnnnnnnnnnnnnnnnnnnnnnnnnnnnnnnnnnnnnnnnnnnnnnnnnnnnnnnnnnnnnnnnnnnnnnnnnnnnnnnnnnnnnnnnnnnnnnnnnnnnnnnnnnnnnnnnnnnnnnnnnnnnnnnnnnnnnnnnnnnnnnnnnnnnnnnnnnnnnnnnnnnnnnnnnnnnnnnnnnnnnnnnnnnnnnnnnnnnnnnnnnnnnnnnnnnnnnnnnnnnnnnnnnnnnnnnnnnnnnnnnnnnnnnnnnnnnnnnnnnnnnnnnnnnnnnnnnnnnnnnnnnnnnnnnnnnnnnnnnnnnnnnnnnnnnnnnnnnnnnnnnnnnnnnnnnnnnnnnnnnnnnnnnnnnnnnnnnnnnnnnnnnnnnnnnnnnnnnnnnnnnnnnnnnnnnnnnnnnnnnnnnnnnnnnnnnnnnnnnnnnnnnnnnnnnnnnnnnnnnnnnnnnnnnnnnnnnnnnnnnnnnnnnnnnnnnnnnnnnnnnnnnnnnnnnnnnnnnnnnnnnnnnnnnnnnnnnnnnnnnnnnnnnnnnnnnnnnnnnnnnnnnnnnnnnnnnnnnnnnnnnnnnnnnnnnnnnnnnnnnnnnnnnnnnnnnnnnnnnnnnnnnnnnnnnnnnnnnnnnnnnnnnnnnnnnnnnnnnnnnnnnnnnnnnnnnnnnnnnnnnnnnnnnnnnnnnnnnnnnnnnnnnnnnnnnnnnnnnnnnnnnnnnnnnnnnnnnnnnnnnnnnnnnnnnnnnnnnnnnnnnnnnnnnnnnnnnnnnnnnnnnnnnnnnnnnnnnnnnnnnnnnnnnnnnnnnnnnnnnnnnnnnnnnnnnnnnnnnnnnnnnnnnnnnnnnnnnnnnnnnnnnnnnnnnnnnnnnnnnnnnnnnnnnnnnnnnnnnnnnnnnnnnnnnnnnnnnnnnnnnnnnnnnnnnnnnnnnnnnnnnnnnnnnnnnnnnnnnnnnnnnnnnnnnnnnnnnnnnnnnnnnnnnnnnnnnnnnnnnnnnnnnnnnnnnnnnnnnnnnnnnnnnnnnnnnnnnnnnnnnnnnnnnnnnnnnnnnnnnnnnnnnnnnnnnnnnnnnnnnnnnnnnnnnnnnnnnnnnnnnnnnnnnnnnnnnnnnnnnnnnnnnnnnnnnnnnnnnnnnnnnnnnnnnnnnnnnnnnnnnnnnnnnnnnnnnnnnnnnnnnnnnnnnnnnnnnnnnnnnnnnnnnnnnnnnnnnnnnnnnnnnnnnnnnnnnnnnnnnnnnnnnnnnnnnnnnnnnnnnnnnnnnnnnnnnnnnnnnnnnnnnnnnnnnnnnnnnnnnnnnnnnnnnnnnnnnnnnnnnnnnnnnnnnnnnnnnnnnnnnnnnnnnnnnnnnnnnnnnnnnnnnnnnnnnnnnnnnnnnnnnnnnnnnnnnnnnnnnnnnnnnnnnnnnnnnnnnnnnnnnnnnnnnnnnnnnnnnnnnnnnnnnnnnnnnnnnnnnnnnnnnnnnnnnnnnnnnnnnnnnnnnnnnnnnnnnnnnnnnnnnnnnnnnnnnnnnnnnnnnnnnnnnnnnnnnnnnnnnnnnnnnnnnnnnnnnnnnnnnnnnnnnnnnnnnnnnnnnnnnnnnnnnnnnnnnnnnnnnnnnnnnnnnnnnnnnnnnnnnnnnnnnnnnnnnnnnnnnnnnnnnnnnnnnnnnnnnnnnnnnnnnnnnnnnnnnnnnnnnnnnnnnnnnnnnnnnnnnnnnnnnnnnnnnnnnnnnnnnnnnnnnnnnnnnnnnnnnnnnnnnnnnnnnnnnnnnnnnnnnnnnnnnnnnnnnnnnnnnnnnnnnnnnnnnnnnnnnnnnnnnnnnnnnnnnnnnnnnnnnnnnnnnnnnnnnnnnnnnnnnnnnnnnnnnnnnnnnnnnnnnnnnnnnnnnnnnnnnnnnnnnnnnnnnnnnnnnnnnnnnnnnnnnnnnnnnnnnnnnnnnnnnnnnnnnnnnnnnnnnnnnnnnnnnnnnnnnnnnnnnnnnnnnnnnnnnnnnnnnnnnnnnnnnnnnnnnnnnnnnnnnnnnnnnnnnnnnnnnnnnnnnnnnnnnnnnnnnnnnnnnnnnnnnnnnnnnnnnnnnnnnnnnnnnnnnnnnnnnnnnnnnnnnnnnnnnnnnnnnnnnnnnnnnnnnnnnnnnnnnnnnnnnnnnnnnnnnnnnnnnnnnnnnnnnnnnnnnnnnnnnnnnnnnnnnnnnnnnnnnnnnnnnnnnnnnnnnnnnnnnnnnnnnnnnnnnnnnnnnnnnnnnnnnnnnnnnnnnnnnnnnnnnnnnnnnnnnnnnnnnnnnnnnnnnnnnnnnnnnnnnnnnnnnnnnnnnnnnnnnnnnnnnnnnnnnnnnnnnnnnnnnnnnnnnnnnnnnnnnnnnnnnnnnnnnnnnnnnnnnnnnnnnnnnnnnnnnnnnnnnnnnnnnnnnnnnnnnnnnnnnnnnnnnnnnnnnnnnnnnnnnnnnnnnnnnnnnnnnnnnnnnnnnnnnnnnnnnnnnnnnnnnnnnnnnnnnnnnnnnnnnnnnnnnnnnnnnnnnnnnnnnnnnnnnnnnnnnnnnnnnnnnnnnnnnnnnnnnnnnnnnnnnnnnnnnnnnnnnnnnnnnnnnnnnnnnnnnnnnnnnnnnnnnnnnnnnnnnnnnnnnnnnnnnnnnnnnnnnnnnnnnnnnnnnnnnnnnnnnnnnnnnnnnnnnnnnnnnnnnnnnnnnnnnnnnnnnnnnnnnnnnnnnnnnnnnnnnnnnnnnnnnnnnnnnnnnnnnnnnnnnnnnnnnnnnnnnnnnnnnnnnnnnnnnnnnnnnnnnnnnnnnnnnnnnnnnnnnnnnnnnnnnnnnnnnnnnnnnnnnnnnnnnnnnnnnnnnnnnnnnnnnnnnnnnnnnnnnnnnnnnnnnnnnnnnnnnnnnnnnnnnnnnnnnnnnnnnnnnnnnnnnnnnnnnnnnnnnnnnnnnnnnnnnnnnnnnnnnnnnnnnnnnnnnnnnnnnnnnnnnnnnnnnnnnnnnnnnnnnnnnnnnnnnnnnnnnnnnnnnnnnnnnnnnnnnnnnnnnnnnnnnnnnnnnnnnnnnnnnnnnnnnnnnnnnnnnnnnnnnnnnnnnnnnnnnnnnnnnnnnnnnnnnnnnnnnnnnnnnnnnnnnnnnnnnnnnnnnnnnnnnnnnnnnnnnnnnnnnnnnnnnnnnnnnnnnnnnnnnnnnnnnnnnnnnnnnnnnnnnnnnnnnnnnnnnnnnnnnnnnnnnnnnnnnnnnnnnnnnnnnnnnnnnnnnnnnnnnnnnnnnnnnnnnnnnnnnnnnnnnnnnnnnnnnnnnnnnnnnnnnnnnnnnnnnnnnnnnnnnnnnnnnnnnnnnnnnnnnnnnnnnnnnnnnnnnnnnnnnnnnnnnnnnnnnnnnnnnnnnnnnnnnnnnnnnnnnnnnnnnnnnnnnnnnnnnnnnnnnnnnnnnnnnnnnnnnnnnnnnnnnnnnnnnnnnnnnnnnnnnnnnnnnnnnnnnnnnnnnnnnnnnnnnnnnnnnnnnnnnnnnnnnnnnnnnnnnnnnnnnnnnnnnnnnnnnnnnnnnnnnnnnnnnnnnnnnnnnnnnnnnnnnnnnnnnnnnnnnnnnnnnnnnnnnnnnnnnnnnnnnnnnnnnnnnnnnnnnnnnnnnnnnnnnnnnnnnnnnnnnnnnnnnnnnnnnnnnnnnnnnnnnnnnnnnnnnnnnnnnnnnnnnnnnnnnnnnnnnnnnnnnnnnnnnnnnnnnnnnnnnnnnnnnnnnnnnnnnnnnnnnnnnnnnnnnnnnnnnnnnnnnnnnnnnnnnnnnnnnnnnnnnnnnnnnnnnnnnnnnnnnnnnnnnnnnnnnnnnnnnnnnnnnnnnnnnnnnnnnnnnnnnnnnnnnnnnnnnnnnnnnnnnnnnnnnnnnnnnnnnnnnnnnnnnnnnnnnnnnnnnnnnnnnnnnnnnnnnnnnnnnnnnnnnnnnnnnnnnnnnnnnnnnnnnnnnnnnnnnnnnnnnnnnnnnnnnnnnnnnnnnnnnnnnnnnnnnnnnnnnnnnnnnnnnnnnnnnnnnnnnnnnnnnnnnnnnnnnnnnnnnnnnnnnnnnnnnnnnnnnnnnnnnnnnnnnnnnnnnnnnnnnnnnnnnnnnnnnnnnnnnnnnnnnnnnnnnnnnnnnnnnnnnnnnnnnnnnnnnnnnnnnnnnnnnnnnnnnnnnnnnnnnnnnnnnnnnnnnnnnnnnnnnnnnnnnnnnnnnnnnnnnnnnnnnnnnnnnnnnnnnnnnnnnnnnnnnnnnnnnnnnnnnnnnnnnnnnnnnnnnnnnnnnnnnnnnnnnnnnnnnnnnnnnnnnnnnnnnnnnnnnnnnnnnnnnnnnnnnnnnnnnnnnnnnnnnnnnnnnnnnnnnnnnnnnnnnnnnnnnnnnnnnnnnnnnnnnnnnnnnnnnnnnnnnnnnnnnnnnnnnnnnnnnnnnnnnnnnnnnnnnnnnnnnnnnnnnnnnnnnnnnnnnnnnnnnnnnnnnnnnnnnnnnnnnnnnnnnnnnnnnnnnnnnnnnnnnnnnnnnnnnnnnnnnnnnnnnnnnnnnnnnnnnnnnnnnnnnnnnnnnnnnnnnnnnnnnnnnnnnnnnnnnnnnnnnnnnnnnnnnnnnnnnnnnnnnnnnnnnnnnnnnnnnnnnnnnnnnnnnnnnnnnnnnnnnnnnnnnnnnnnnnnnnnnnnnnnnnnnnnnnnnnnnnnnnnnnnnnnnnnnnnnnnnnnnnnnnnnnnnnnnnnnnnnnnnnnnnnnnnnnnnnnnnnnnnnnnnnnnnnnnnnnnnnnnnnnnnnnnnnnnnnnnnnnnnnnnnnnnnnnnnnnnnnnnnnnnnnnnnnnnnnnnnnnnnnnnnngatcctgtcgaaagaaacgaatggaatggaatggagtggagtgtagaggtgtggagtgatgtggagtggaatggagtggaatggaatgggatggatttgaatggaaggagtgtagtggagtggattggagtggagtggagtggaatggaatggaatggagtggaatggaatggaattgaatggaatggaatggaatggaatgttgtggagtgtattggaatggagtgaaatagagtgtaatgtaatgtagtggaatggagtggagtggagtgcagtggagaagggtgtaggggaatggaatggaatagtgaaatgaaatgtgagctgagatactcccactgcactccagactgtgtgacagaatgagatcctgtcgaatggaattgaatagagtggaatgaaatggagtgcagtggagtggagcagagtggagtggagtggagtggaatggaatggaatgggatggaatcaaatggtatgaagtggaggggaatggagttgagtggagggacgaggagtggaatggaatggaattggatggaatgggatggagtggagtggagtggggtggagagtagtggagtagagtggaatggaatggagtggagtggagtagagtggattggagtgtaatggaatagaatggaatggataggaatggaatggtatagaatggaatgatgaaatgaaatatgagctgagattgtgccactgcactccagcctgggtgacagagtgagatcctgtcaaaggaaaggaatggaatggaaaggagtggaatggaatggaatggaatggaatggattgattggagtgcagtggagtagaggtgagtggagttcacagtagtgcaatggaatggaatggagtggagtcgagtgcagtggagtgggttggaatggaatggagtggaatggaatgggatggaatggaatggagtggagtggagtggagttcacaggagtgcaatgaaatgggatggaatggaattgaatggaatggaatggaatacaatggagtggaatgcaatggaatgcaatcgaatggaattgtgaaattaaatgtgagctgagatagtgccactgcactccagcctgtgtgacagagtgagatcctgttgaaagaaattagtggaatgtaagagaataaattatactggaatggaatggattggagtggagtggagaggaatggagcttaatggagtggaagggaatgggaaggagtggaatggaatggagtggagtggagtggagtggagagaaatgaggtaaaatgcaatgggatggactggaatggagtggagtggagtggagtgaattggaatggagtggatttgactggattgcagtggaatgaagtggagtggaatggaatggaatggaatggaatggaatggaggggagtggagtggagttgaggggaatggagtggagtggaatggagtggaatggaatggaatggaatggtgaaataaaatgtgagctgagattgtgccactgtgttccagcctttttttgacacagtgagagcccgtcaaaggaaaggaatggaatggaatatggtggaatggaatggagtggagtggattggagtggagtggagtggagtcaagtggaacagagtggaatggaataggatggaatcgaatggcatgtagtggagtgggatggagtgaatttcagtggattagggtggaatggagtggaatggaatgggatggaagggaatggcatggagtgtagtggagtggactggagtgggttagaatggaattgaatggaatggtatggaatggaatggaatggaatggaatggaatggaatggtgaaattgaatgtgagctgagatagtgccactccactccagcctgggtgacagattgagatcctgtcaaaagaaaggaatggaattgaatggaggggaatggaatgggatggagtggggtggagtggagtggagtggaggggactggatttgagtggagtctagtggaacagagtggaatggaatggggtggagtggaacggaatggaatggagaggagtggtgtggagtggagtggattggaattcaatgggatggaatggtatggagtggagtggaatggagtggagtggaatggaatggaatggaatggaattggaatggaatggaatggaatggaatggagaggagaggaatggagtggaatgtagtgtaattggaaaggatggaatggaatggaatgccatggaatagaattaggaatagaatggaatgatgtggaatggaatggagtagaattcagtggagtggagtggagtggagtggaatgtaatgtaatggaatgggatgggatggagtggaatggaatggagtggagtggagtggagtggagtggaatggagtggaatgcaatgggatgtgatggaatggagtggagtggagttgagtggattgaaatagaatggaatggagtggagaggagtgtagtggaatggaatggaatggaatggaatagaagggaatagaatggtgaaatgaaatgtgagctgagattgtgccactgcactccatcctgggtgacaagtgagattctatcgaaagaaaggaatggaacggattagagtggaatggaatggagtggggtagagtggagtggagtgtagtggagtagagtggaataaagaggaatggaatgggatgtaatggaaaggaatgcagtggagtggagtaaagtggagtggagcggagtggagtggtgtggagtggagtggagtggagtggagtggagtggagtggaatggaatggaatggaatggaatggaatggaatggaatggcacggtgaaatgaaatgtgggctgagattgtgccacttcactacagcctgggtgacggagtgagttcctgaagaaataaaataatgtaatagaatggattggaatgaaatggaatggagtgtagtggactggagtagagtggaatggagtggagtagagtggaagggaatggaatgaaatgagatggaatggaatggaatggaatagaatggagtggagtggagtgcaaaaatcctcaataaaatactagcaagccgaatccagcagcaaatcaaaaagcttatccaccatgatcaaatgggtttcatccctgggatgcaaggctggtacaacatacgcaaatcagtaaacgtaatccatcatataaacagaaccaacgtcaaaaaccacgattatctcaatagatgcagaaaagccctttgacaaaattcaacaaccttcatgctaaaaactctcaataaattagatattgatgggacgtatctcaaaatattaagagctatttatgacaaacccgcagccaatatcatactgaatgggcaaaacctgaaagcattccctttgaaaatctcagttacctttcttttggatatgagtgtgaggaaagagtacctacaaactacccttttagttaaatgccatatacaataaatattaatacctacagtcctcatgttgtacattagagccctcaatttgttaattctacatatctgcaactttgcatccttcgaattctctctctccattttctcttctcacccccagcccctggtaaccactgttttatactctatctctgcatatttacctttttgctgtttttgtcctgagaagtttattgggactttcagctaggagataatatgttctgagtcttgattatctcaaattatatcaggtaagaagttttacttgtctggagagcagagagcaagtgcataattttatgcagaagagggaataaagagaattctctaattaaaatttgaatcagaaatatggttcatatttttatgtacaacaatctctaaggcttcttggaaaggaactagctgcctgattttttttcatttgaatcctctaatacatgaagaggatgattctaccataccaatcacaagaatgatatctgtagaatcaaaagttgaaatcctattatcctagaagttttttcagaaaacttgaacatgtattgaaatgtcatgctggtcatatatgttacagcaatgaggaatttacttattatatactttagctttttagccctttccctgcccaccagaaatgtttcttttgaatccaatttggtcctcagagttttagaatgttaaggaatgtataggggtatcttttttcttcttttttttttttgtcaagctattgtatatttttactttacctgtttgggtatgtagttactatttgtttggactgtcatactagaaaaaaattatagtgaattttacatgtatggagtcttcattaatctgtataaactgacaagtttagaatatcaaagtcatcactgtaaaaaataaagtgatattttatctggtctatctccttgcaaataaaagaacaataaattctgtactattatgaaatataagagcttgaaaatttttcaagcgtcttgtatagaatggccttcgaattcaaggtataaactacaacaaaacactttcgagatctagtttgattgaagagtgcattcttacttatttatatattctctgcaatttctgattcaagatagtccacaattctaaaggaaaaccaaaatagaataataattataaaacaaaataaaaagtaattgaggaagataattgagcaacttattcttgacaactagctttttaacaaacagaaaagtgcactaaaaatactgcctagttgtttaaagtaggctgagatctgactgtatcccctgagtgacataaagaaaaaactacctttgaggaagcacagtgattaaatttaaaagatttattgtttaacctcaggaagactttcaataactttttataaattgtatacagttaatggaagacatgctaggcttcttgtaagaatttattccagatcactgtgtataattaatggcttgtctacatattttttcaataaaactgttcatgaagaattttaagtatgcactttcagtaacagaatggatatatctttgtgaagataccatttatgtaccataacatccaaagcataatgaggagattttgatacactgcagatttagaactgagttggaaaacaaaacttcaacatactgtcttgtcagcacaaagcaaataaattcatcactgtcagttgagatttaaattcacaaacttataagcaataaaatcaaagtaattttgttataagttttttgacaccagattatatggggtaaataatttactttctaatcaagcaattgatacatataaacctgaaatagagagttttgccttttaattagatacattgttacgcaaagagtggttgaagctgcagtggagaattatctttttctctttttgctgttcttacaaggacagtttctagaattcttttcaaaacaatagaacagaaaatttcacttacttaatttaacttttgttaaagtactttgccaaaattagcaaactatgaaaggaaagtttgccttttcaatatatatgtaagtggcaagtaaaagttgttcttaaatcacgtgatctcatagaaataacatgggataaaaagagttctgaaggtgttcaggaaatgccagtcctaaatgtattgctttggtgtactgattatattgaactgaaaatatttgaaaaataacaactgtgggacatgctttctctgcactccctttacgttcctcaagagagatcctccaaaaggaattttcaataccagaatgaatgtatctttgtaaagataccatttatctaccataacatccaaagcatgatgaggagatttttatacactgcagatttagaactgaattggaaaacaaagcttcaagatactgtcttgtcagcacaaagacattcatctccttcctaggagtttcatcagccagggaaaattgactcctcatatcacaggagacaagactaagagtccattccacaccaaggcagactgccacaaactatcatctatgctcctaggggtctggtcatctttcccaaaagtcatttgctctcccttaagtttcctacattcttcctcctgccttccctacaagctcctaaatctccctgggtttttttcttggtggtgttttgtttgttttgttttgttttgtttttgattccacgtttctttcctgtgattcccccatgcgtgtaataaatgtgtacacattttcttcttttgacatgcctgttatccatttattcaatagactcagttatcataccttcagagggtagagggaaaggtctccaagtcctacagttccaaaagaaaatagctagtaatgcaaatgcaaaagtcatataaactttgagacaaagttagcgtcttatatggtacgttcagaaagaagaggtgtgttgcacaccaagggacattttcctggtcttagctactaagtttctctgagaagaagcagttactactacagcagttaaacacctgactcccaaattataaaagcctaagtgttcagattaaatcatgagttgtcacctgtgaatcataaagtctgaactctttaaattgcaaacacacatagaaaaacgattcttacacagggatccatgagtggaactgcaaagttttgtcaaaatctatatatatgttttctttttaagggtcatagatttcaatatatgttaaaagatatctggggctagtaaagattaataaccattttcagttttgtgctgaaattggcaaatcatggcttttctccctccaacacaccccctcccgcctcagcacaccactggttaatctttattttcaggagagaaaaagatgtttcatattaataaaggtaaattatacacttgtttgttttatacttttccacctcttaagcttaatcgtgttttaataatgtataattgaatacattaacatttagatgttagtaaatgaataacaaatgttcattgtttctcttgagtagaggaataaaaattttgcacctgttgtatagaatgatttttaaaatctcattcaatccttcagaagtttaagattttttttcaagaatttttatataaaatttttactcagaagcagatagctcacaaaaagtatgggggttttttggattataaataaactattccactcaccaagatgctgagacatcctactttgtggtattttgaaataaaaacaaaacacaagaatgtgacgatgaagcaagtgaaaattaaaagggtacagactttagaagtatcataagctaaaaataaaatgaaacaaacctgtaaaggaaccaaaagcccaggtagatataatacagtaaattatgagaagctaaaaaaaatgaggaggtgataaacaataaagtgaaaatctctgataaagccaaaactacttgaatggcagtcaacaaaacagaagaaaaaaatgacactcataacaaggcagaactatggaaatgcatccctgggggtaagataatagagttgcgaattagtggaggtggatcacaaatactggccaaataaagcccgctaacataattcaaaggacagagaaattctgtagctgaagataaaaagtctgaaatacattatggtatagtcaaatgagtgtcatttctaatagacacacttatttttcaagagttgataatatgaagtaaaaatttagtatgcaaagttcaaattttccatttgttgagtaattcatttttattaaatattttccaacaattaaactaaagtggtaccagaacagagtagacattctgagttttcactttacaaaagctacacataaatctacgtacttcttaagggtataaacaaagtcagagcctgtgtgatatttcaataaacaattggagaaaatttttttaagaatagattatatacatattgacctctttgagaaccttatttttttcttttttttgtgtgtgtgtttgtttttttttgtgtgtgtgtgttttcatttcttttttaaattattattattatactttaagttttaggttacatgtgcacaacgtgcaggttcgttacatatgtatacatgtgccatgttggtgtgctgcacccattaactcgtcatttacattaggtgtatctcctaatgctatccctcccccctccccccaccccacaacagttcccagtgtgtgatgttccccttcctgtgtccatgtgttctcattgttcaattcccacctatgagtgagaacatgcggtgtttggcttttcatgcttgcgatagtttactgagaatgatggtttccagcttcatccatgtccctacaaaggacataaactcatcatttttatggcttcatagtattgcatggtgtatatgtgccacattttcttaatccagtctatcatcgttggacatttgggttggttccaagtctttgctattgtgaatagtgccacaataaacatacgtgtgcatgtgtctttagagcagcatgacttataatcctttgggtacatacccagtaatgggatggctgggtcaaatggtatttctagttctagatccctgaggaatcaccacaccgacttccacaatggttgaaatagttcacagtcccatcaacagtgtaaaagttttcctatttctccacatcctctccagcacctgttgtttcctgactttttaatgattgccattctaactggtgtgagatggtatctcattgtggttttgatttgcttttctctgatgggcagtgatagcattttttcatgtgttttttggctgcataaatgtcttctttttagaagtgtctgttcatatccttcacccactttttgatggggttgtttttttcttgtaaatttgtttgagttcattgtagattctggatattagccctttgtcagatgagtaggttgtgaaacttttctcccattctgtatgttgcctgttcactctgatggtggtttcttttgctgtgcagaagctctttagtttaattagatcccatttgtcaattttggcttttgttgccattgcttttggtgttttagacatgaagtccttgcccatgcctatgccctgaatggtattgcctagtttttttctatggtttttatgattttaggtctaacatgtaagtctttaatccatcttgaattaatttttgtataaggtgtaaggaagggatccagtttcagctttctacatatggcttgccagttttcccagaaccatttattaaatagggaatcctttccctagttcttgtttttgtcaggtttctcaaagatcagatagttgtagatatgcggcattatttctgagggctctgttccattccattggcctctatctctcttttggtacaagtaccatgctctttttgtcactgtagccttgtagtatagtttgaagtcaggtagcgtcgtacctccagctttgttcttttggcttaggattgacttggcaatgcaggctcttttttggttccatatgaactttaaagtagttttttccaattctgtgaagaaagtcattggtagcttgatggggatggcattcaatctataaattaccttggtcagtatggccatttttacaatattgattcttccatgagcatggaaggttcttacatttgtttgtatcttcttttatttcattgagcagtggtttgtagttctccttgaagaggtccttcacatcccttgtaagttggatttctaggtattttattttctttgagacaattgagatccttattgtgagattcaattcagaatctgggattttgttttgttttgagatgtagtctctctctgtcaccaggctggagtacagtggcacagtctctgctcactgcaatctctgcctcccaggtccaagcgattctcctgcctcagcctcccaagtagctggaactacaggcacgtgccaccatacccagctaatttttgtatgtttttttagtagagatggggtttcaccatgttggccaggatggtccggatctgttgaccttgtgatttgcctgcctcagcctcccaaagtgctgggatcacagacgtgagccactgcgcccagcccagaatctgggtcttaaccagatttgccattataaaatgaaatgaaaccaaaaccaccagtcaatatctgtagcagtgttattgttggggagcatgcacgtttgtttgagcttacttatatatacagagctgtttagcttaatctttaaattgaaaatttttagtatttttagaatgttttagatactttgatgaataaattttgtgttaacaaactactattaataaaacttataaattaaatatttctgaacacattggcagaggtaaatgataaagttatattcacacaattagtttttcttgcacagaattgacattttgtcaaaaagttaaaatctttgaaatgtgttttctgtcctcatctttccccttttgagcatttttccccctgggttggttataaaatattccctaacttcaggcatctggttaagttttgggttttctcccttcctaccaactcatatggattggtaatgatctgatagaagacaattgccaaaaatcaatcaaatatgttttaaatgaaacttctccaatataatattcatattaatccttctttaattgctgaatgagtaataattgttcactgacccttaaaatcctaaaacttaatcagctcactggagtggatgaatggatgtttgtctagatgagaatgcttaaggtctacttcaaggagttcataatagtaaaaatgtccttttcttccatcagaaacttcatcctggatcttttcatccttgtttttctactagctctccttctccaaatacactgacttggaaccccagtttcagtggtggactgcgtggatttgattctaagctatgctataatgagaaagtagctctaaccctattctcattttcttcacctgtaatatagaaatcatcatcagacaatatacagataggggccagttatttcacagataataataggtgaaaatggagagtatgtgggtgtaggcatggaaaagtgagtttaaatggtttcaggagtctgtggaaattgtctttgggtgattcaatgttctcagggaagcacacccaaaaagacattgaggatttctggggaagtgttagggattagagacaggataagatacaaaactaggaaaattagagagtgaatagattggaacatatgtagtatgattgattgataggcggcactcagattctcagtttcaagtgggatatttttcaatttgatccatatagctagttgctcaaatatatgtggggatttggtggaaatttggatctaaccagggttattttcctggttagattcagcaaagtgaaagagaaacaaggaagttgaagtttcctgggaatggttggccacggaatttaggcaggagaacaggaaatagagtacatcagtaggtaagggtcattataaatatgataaaataatagtttggaggtctcagagagattgaaaaattttatgtcagcgtatgaaagggaatgattaaaggaggagttcagagaatgggatgaatgaaattgtgactacagaggagttgctattataagtaacgacgatgcttcactcagttcctctggaagtgtggtccctgtgctagcagcaacagcatcacctgggaacttactagaactgcatattctcaggttacacccccagatcttccaaatatgaaattccaatagcaggtctcagcaatctcttattgtaacacaactgtaggcaattttgaggcacacagtagttagcacaactggtctagtgtatgtcttatttggtcttcctccccggttcacagtacagagctcctaaaacttgaaatttcctgatagagatgagaggaccatcctttactagtcataagtccctcttagccatacctgagtttatgctattgacatgacatgagtggtggttggagacccgtatggcttcagggtgggtgcttgacaccagaaacatgaaggcataactagatggttaaaactgtcagccctctcctccatcacctctgaggtgctgggagggtgatacaatgatatacttagaggtcatatggcagctttgtgccccttttcaccatacctggccctatgtgtctcttctatttgacagttcctgatttgtatcagacagtaactgtaagcaaagtgctttcttgggttctgtgagccatcttagcaaattatagaacctggggaaggaatccatggaagtgctaatttatagccagttggtcaggagtatggcaggcccacaactcctctctaatggtgggggggtggcagtcttgtggtcctgaaccctgaacttgtgggatctgatgctatctccagatagatagtctcaggattgaattgaattgtaggacaccatttggtgtcctgagagttgaaaaattgattggggtgagactaaaccaacaaatttcatctcagaagtttgagtagaaataattctgttggaaaacattatcgttagatcaaaggtgttaatagaactgagagatcaaaatggcaaagagtcatctatgattacacattgttgacataaactagaattaagacaagagtatgtcaaagagagttacattgagccagggataaaaatagtcaattgattgattagaatttagtaaatgctattttttgaaaaattaatatttagttaattaatggagatacttaattatctccattttgactttaaatttaaaactaaaaaattgatattttatctattttccataaatggaaattgaaaagcaatagcaaaatgcttcgacagaaaatctgcccttcttattcccaagaggaagaatggccaactaccttaagaataagttagaaaaactttcataattttttaagttgccatattttatagctttgaacaagttgaattattaactagactgcccagggaatggagccatctaatataatttccttactatttagataaaatctttgttgttgaaaatcttaatcatttttaatgatcctgttttcagagcctgatattaatgattcgtgaaactcattaaatgcagttatgcatctgatttgaaaatcatgagggagatttttggtcagatatgcatagcaaatctatgtcactagacataagtcccttctacccatgccacaacctttatgtctactcttgaattgaggttttgctacgttttatttttgaggtttaagaattattcatttaactgtcggaaaattgtgtttctcttgttagaatagagcccaatttatcctttctatttttcatggagacatgaaagtatgtgaatttgcaatcagagaaacctgagttccaccatgctttcttcctcttgcaagccatgaaatccacagtgggttagtggatattacaaacctctggtcccaccttattaagatggaaaaaaataagactaattgaaagaacaaatgtggtaatgagaagaaatggtatcaataaaattcctggaacacagtaagttctaacaaatgctagttcttttctttcataattcaaaatctaaatagaagccagttggtaattccaagataatagtatgaagacaaaaaaaatgtttgttaactgaccttcaaccattgagaccttatcttataggaagcaaaattaacaaatattttctcccttctacaaatgtataccctctgagaaagagagacagtgttccaatcaagacgatgacagtattctgtgcacacataggaaaggaagaagaatcagagagaacctttaaaaagacaattttagataggcatcctatttttaccggcaataacattttttagaacttacggcatacaaaatagaccttaaatggactcagtgttgagaaatttttataaggctgctttattttcttctatggtaaatctaggaaccaataaaatagctttgataattcactcattacattctttcctaactaaactatttacattataaactttgttgatatgctgtgcttttgcattaataattctcatgtgtctcatttgtgaatacatgaaaactagttgtaaaataaggaaaatgtaattttgaaacatcttcaaaaacagttgcataatttaacaaatgtttataaattttcgtccttactctaaaaccatagatatcctaaaattgactgaaggtaaaatgatttttaaagaactggatttctcaccatgagttattttatctccatacaaactgtggtagtgttatacaatggttaagaagaaattacttaaaaatgagaataaagatacagcttattaacacttcattttgtggatgagacctgaaaaattaaacttttcttctagagacaagttgtagttgtgtatatagagtgtgaatagatagtgtccatattttactgtcattatttaaacagaaacatgcaatttgcacttcaaaaacctactacaaattaactgtgtcatttggaagtgtcaaaattatctcattaatgatcagataggcttttggctcattgtaatgagatgttcctataaacctaatttgaaagacaaagacagagtttggagtctttaattcttggtaaaaatcagtagctctatttagggctatatttgcaaaatactatttcaactcaagcatatttttatttacaaggcacttcacaaatgttgaccacaaagatgtttctacctagcagaaataattatagttacatatagttgtctaggaatatcttaaacatggggtattaaaataactttcaagaacaagaagaaatgttacaccaggcatttttgcaactagtgctctatttcagtgcaatatttgtggcaattaaaaaacataaatggcttggatatatagctaagttatcaaaggaaaaatatgcaaaggcatgattattttataaatgtgccacatatgtgacttgaggtacaaatcctctaagtttaaaattgtctttttaaaaaagaaatcaaaacagacaagtgggcaatgagttatggatactattatagggtaccctgataaactagtaagaagacgacttttggtactgaaaattccaattaaccacatgcccccattaaggccatgatcactgccaatttttactcacaaaggctggagctagagttatatggaattccatatgtatctaaaccatagatttatcaattatcacttaaatacaacttggaagacactatccaaaatttgtagggcttggccttattctagagaaacatacactggaataggcagttggattttaaattcagtcttaaatctgttgaaaataatgcatttttttctcagagatgagatattgttcaactcttttgacttattttagatttgataatatacagttcaaacaccatggagatttactaatctgaatgaacacataccaaatttgtctttgctccagtctcgaaatttgagattaattctagctgctgaagaaattttccagtgttaggagtatgcttcaatgctagtgaccggtactactttctggtaaactatagatgacatgtgtgctttcattgcctaaactcactttgtagaacaccattaaatgaaaatcatcaccagcaatttgggaggctaaggcgggcagatcatttgaggtcaggagtttgagacgagcctggccaacatgatgaaaccccgtctctactgaaaatacaaaaacttatccaggcatggcgggatgcacctggaatcccagctacttgggaggctgaggcaggaaaatcgcctgaacccaggatgtgaaggttgcagtgaacagagatgttgccattgcactccagcctgggcaacagagtgagacttcatctccaaaaaaaggaaaaaatgagagagagagagaaaaaaaattatcagtgttcagtgactctttgtttttcatgctgataaactattacgcagaaaaagaaaattttcatgctgataaactattacacagaaaaagaaatgtatccattatggacaattaaaagggctatacaatctctctcattgtatgattctagttttctttatttttcttttcttttgttcttttttttttttaatacaggatctcactctctcacccaggctggaatgcagtggctctatcttgactcactgaaacctcagcctcctgggttcaagctattctcctgccttagcctcctgagtagctaggaataaaggcattcaccaccacgccagctaatttgtgtatttttttaatacaggtggcgttttgccatgttgcccaggctggtcttgaactcctgacctcaaatgatcctcccacctcggcctccctaagtgttggcattacaggcataagccaccatgcttggcctgattctgttttttaacacaattcttattacttctgtttcaattttacaaagccataggtttttaatctgggaaacctttgagaaaacatccagataaatttataaatagaaaaataaattcagacacatataattaagtttatgatctaacaagtgggtgacaaccgaaaactttccaagttccataaactgaagtgaaaggatcactttcctgaaaatattacaaaggcttgataattacctggattgtactaaaacctacacaatctagtatattctatagcagcaattcataaagacagcttcacttaccatgtagaatttatacatacattaaatttaaggaatgcattacttgctattggagtaggataataaactcccagcagaactgattttcatgaatgcctattaaactatcattgatgtagaaattaaacaatatattaagctattcagacccagattgtgagagacagagaaaaacttcaaaaaagttcagctaccaaatcccttcctcaatagctctttgagtctcaagacagtttcaaccacacacatcctcagagtcttatggtccaaacaacatttgactgcagctctaaagtaagcaaacatttgaaaagaaactcaaagatctatacctgtagttatggtcaaggaagtccacctactggtgggtgagcatggcaaggatagggactaagccaaatgatgggtttaccaaaacagaaacaagagaagtcattggaagcacagtccaggttataacaggagcccaggcacttgatgtgggaaccctatttgtctcattcagcacctagagttttaacgtcctatgaggcacagctaatgcccttcattatttttttgtaattgactgcatagtttagaactatgccttgaatttaatatctatctgttgaataaatgaattaataatgatgaaaatctgtccacaggttatgtgcagtactgaagagcaacttcagctattgaggtatgtatcagaagtcttactctccaaaaagcctctggttagttactgatatacgttgctgataatttcactctcacaatgtaggggaagcaggaatgttatctggcctcttggctccacttcctttgccttccacagatctctctgctggttcacagaggaacactttcgtggctctcagttcattttgcaattctgctagaatctcattccatcctcagttgtaactaccttgtccttcacccaacgcttatttacggagggacagatagcaagaagaaatcgcactctggattacaaagtgggaagacacaccccttggccagaatgcctgcctcctatgttcatgaaggatatttctaattgatctcggcactcttttccattgagcccatgtcccaaattggccgtgagttagggagaggactctagagtgggaaagctgtacccaaaacttccctaatctgactatcaagcctaaaaaattaaactttcaattcaacatcccttgtttctccaacttggagtgcctgatggtgtgggaagcccctactcataaaaattcatagttgaagattgttggtaattttgcccaacctccttcttttctttttattctactttaagttctagggtacatgtgcacaacgtgcaggttcattacatatgtatacatgtgacatgttggtgtgttgcacccattaactcgtcatttacattaggtatatcccctaatgcttttcctcccctagcccgtcaccccacaacaggccccggtgtgtgatgttccccttcctgtgtccgtgtgtactcattgtttaattcccacctatgagtgagaacatgtggtgtttgtttttttgtccttgtgatagtttgctgagaatgatggtttccagcttcatccttgtccctacaaaggacatgaactcatcatttttatggctgcatagtattccatggtgtatatgtgccacattttcttaatccagtctatcattgttggacatttgggttggttccaagtctttgctattgtcagtagttcctcaataaactccttctttctttgcctagttacacctcaatgcaacctgctggcaggccagccttaagcccagcagtccaaccatgcatctaagctgagttctcatcagagccaacttcaattataaacaactgagatgatgccagaggccagaatccctgagaacccaatttgctgtcatcaccacagctgaaacaaggcgcttggcatctagaaaagctgatctgtaggaaatttccaatagagttcaagtttttctaagtttaaagtgtacaatatcatcaaggtgagacactcaagataaaactaggcttgtgtttaaatataataaaaatatttgaagaatagtaagagtggtgactacttttacacaggaatgtttcaaataaattgtttttttcttgtgccttttaaattttgtgatttgtcaatgagatgctgacatgtttttaatgaagcatgccttgtaaaataataagtgaatgaaaactacacagtaatatttacatcaacaaagctagaagaagactgtatgtctcaagaggctccatcatctacccagtggccacttcaccaaattaagatccaaataccaaaaagaaaagtaattaaaatttgtgttgtatgccttataagaccaaacctataaaatgaggggaaacttcacaattacttgtaatttgctctgtggaattgtaacagatggattataaagatgattccatgataaacatgtaaatgtggttactaccttctgtgctttcttggttcatatttttattgtttttttctttataaacagataattcattcttatctatggcaatgcaaacttttcagatgtattgaatatgtcatagtgtttttctattgtaggcatctctaaaaaagttatagaaaacaaacagagaaaagtctggtgttggaaaggagagagaaataaagcttgtaaaggaatgaagattagagctttctggagataaaaattcttagaagatacaaaagctagttactgaattagatgaaggttctttttcagtttttcccagttgttcacctcttagaaggcacatattcacagcagaaaagaaaaatgtgttaaaaagaaaatacctcggtgtagtgagactgtaatttcatgagggcattactgaagactcactttttccagcatcactcagcatggtattatgcatgtgtgtaatgtaaaggaaagtgaatacgcattcttggatgggtgatcaaatcgtaattccagaatataatcagaagctgattcattatcctcttgagatttcacaatcttttcatcaggaattaaaattcagaagagggtaaatgtatctaatcagttgaaagttaaaaattagaggatggaggcaacatggccgaataggaacagctccagtctacagctgccagcgtgagtgatgcagaagacaggtgatatctgcatttccaactgaggtaccaggttcatctcactggggagtgctggacagtgggtgcagcgcaccatgcatgagccaaagcagggaaaggcatcacctcacctgggaagcagaatgggtcagagaattccctttcctagtcaaagaaaggggtgacagatggcacctggaaaatcaggtcactcccaccctaatactgcgcttttccaacaggcttatcaaatggcacaccaggagattgtatccagcacctggcttggaggatcctacacccacggagcctcactgtttgctagcacagcagtctgagatcaaactgcaaggttacagtggggctgggggaggggctcccgccattgctcaggcttgagtaagtaaacaaagcagccaggaagttcgaactgggtggagcctaacacagctcaaggaggccagcctgcctctgtaggctccacctctgggggcaggacacagacaaacaaaagacagcaataccctctgcagacttaaatatccctgtctgacagctttgaagagagtagtggttctcccagcatgcagcttgagatctgagaatgggcagacagcctcctcatgtgggttcctgacccctgagtagcctaactgggaggcaccccccagtagaggcagactgacatctcacatggccgggtacccctctgagtcaaaacttccagaggaacgatcaggcagcagcatttgcagttcaccaatatccactgttctgcagccaccgctgctgatacccaggcaaatagtgtctggagtagacctccagtaaactccaacagacctgcagctgagggccctgactgttagaaggaaaactaacaaacagaaaggacatccacaccaaaaccccatctgtatgtcaccatcatcaaggaccaaaggaagataaaaccacaaagatgggaaaaaacagagtagaaaacctggaaactctaaaaatcagagtgcctctcctcctgcaaaggaatgcagctcctcaccagcaatggaacaaagctggacggagtatgactttgacgagttgagagagaaaggcttcagaagatcaaagtactccgagctaaaggaggaagttcgaaccagtggcaaagaagttaaaaactttgaaaaaaaattagacgaatggataactagaataacaaatgcagagaagtccttaaaggacctgatggagctgaaaaccatggcacaagaactacatgacaaatgcataagcctcagtaaccgatgtgatcaactggaagaaagagtatcagcgatggaaaacgaaatgaatgaaataaagcatgaagagaagtttagaggaaaaggaatagaagaaatgaacaaagcctccaagaaatatgggactatgtgaaaagaccaaatgtatgtctaattggtgtacctgaaagtgacggggagaatggaaccaagttggaaaacactctgcaggatattatccaggagaacttccccaatctagtaaggcaggccaacatacaaattcaggaaatacagagaatgccacaaagatactcctcgagaagaacaactccaagacacataattgtcagattcaccaaagttgaaatgaatgaaaaaattttaaaggctgccaagagaaaggtcaggttacccacaaaaggaagcccatcagacaatctgctgatctctcctcagaaactctacaagccagaagagagtgggggccaatattcaacattcttaaagaaaataattttcaacccagaatttcatattcagctaaactaggcttcataagtgaaggagaaataatatactccacagacaagcaaatgctgagagattttgtcaccaccaggcctgccctaaaagagctcctgaaggaagcactaaacatggaaaggaacaactggtaccagccactgcaaaaacatgtcaaattgtaaagaccatcaaggctaggaagaaactgcatcaactaacgaggaaaataaccagctaacatcataatgacaggatcaaattcacacataacaatactaagcttaaatgtaaatgggttaaatgctccaattaaaaggcacagactggcaaattggataaagagtcaagacccatcagtgtgctgtattcaggaaacccttctcacctgcagagacacacataggctcaaaataaagggatggaggaagatctaccaagcaaatggaaaacaaaaaaaggcaggggttgcaatcctagtctctgataaaacagactttaaaccaccaaagatcaaaagagacaaagaaggccattacataatggtaaagggatcaattcaacaagaactaactatcctaaatatatatgcacacaatacagaagcacccagattcataaagcaagtccttagtgatctacaaagtgacttagacgcccacaaaataataatgggagactttaacaccccactgtcaacattagacagatcaacgagacagaaaattaacaaggatatacaggaattgaactcagctctgcaccaagcagacctaatagacatctacagaactctctatcccaaatcaatggaatatgtattcttttcagcaccacaccacacctattccaaaattgaccacatagttggaagtaaagcactcctcagaaaatgtaaaagaacagaaagtataacaaactgtctctcagaccacagtgcaatcaaactacaactcaggattaagaaactcactcgaaaccactcaactacatggaaactgaacaacctgctcctgaatgactactgggtacataaggaaatgaaggcagaaataaagatgttctttgaaaccaacaagaacaaagacacaacataccggaacctctgggacacattcaaagcagtgtgaagagggaaatttacagcactaaatgcccacaagagaaagcaggaaagaaataaaattgacatcttaacatcacaataaaaagaactagagaagcaagagcaaacacattcaaaagctagcagaaggcaagaagtaactaagatcagagcagaactgaaggaaatagagacacaaaaaacccttcaaaaaatcaatgaatacagaagctgttttttgaaaagatcaacaaaattgacagaccactagcaaaaccaataaagaagaaaagagagaagaatcaaatagatgcaataaaaattgacaaaggggatatcaccaccaactccacagaaatacaaactacaatcagagaatactattaacacctctacacaaataaactagaaaatctagaagaaatggataaattccttgacacatatactctcccaagactaaaccaggaagaagttgaacctctgaatagacaaataacactctctgaaattgaggcaataattaatagcttaccaaccaaaaaaagtccaggaccagatggattcaaagccgaattctaccagtggtacaaggaggaactggtacaattccttctgaaactattccaatcaatagaaaaagaaggaatcctccctaactcattttatgaggccagcatcatcctgataccaaagcctggcagaaacaaaacaaaaaaaggagaattttaaaccaatatccttgatgaacattgatgcaaaaatcctcaataaaatactggcaaaccaaatccagcagcacatcaaaaagcttatccaccatgatcaagcgggtttcatccctgggatgcaaggctggttcaacatatgaaaatcggtcaatgtaatccagcgtataaacaggaccaaagacaaaaaacacatgattatctcaatagatgcagaaaaggcctttgacaaaattcagcaaaccttcatgctaaaaactctcaataaattagggattgataggatgtatctcaaaataataagagctatctatgacaaacccacagccaatatcatactgaatgggcaaaaactggaagcattccctttgaaaactggcacaagacagggatgccctctctcaccactcctattcaacatagtgttggaagttctggccagggcaatcaggaaggagaaggaaataaagggcattcaattaggaaaagaggaagtcaaattgtccctgtttgcagatgacatgactgtgtatgtggaaaaccccatcgtctcagcccaaaatctccttaagctaataagcaacttcagcaatgtctcaggatacaaaatcaatgtgcaaaaatcacaagcattcttatacaccaataacagacaaacagggagccaaatcatgagtgaactcccattcacaattgcttcaaagaaaataaaatacctaggaataccacttacaagggaagtgaaggatctcttcaaggagaactacaaacaactgcttaatgaaataaaaaaggatacaaacaaatggaagaacatgccatgttcatgggtaggaagaatcaatatcgtgaaaatggccatactgcccaaggtaatttatagattcaattccatctccatcaagctaccaatgactttcttcacagaattggaaaaaaactactttaaagttcatatggaaccaaaaagagcccacattgccaagtcaatcctaagccaaaagaacaaaggtggaggcatcatgctacctgacttcaaactatactacaaggctacagtaaccaaaacagcatagtactagtaccaaaacagagatatagaccaatggaacaggacagagccctcagaaataatgccacatatctacaactatctgatctttgacaaacctgacaaaaacaagaactagggaaaggataccctatttaataaatggtgctgggaaaactggctagccatatgtagaaagctgaaactggatcccttccttacaccttatacaaaaattaattcacgatggattaaagacttacatgttagacctaaaaccataaaaaccctagaagaaaaaccaggcaataccattcaggacataggcattggcagagacttcatgtctaaaacaccaaaagcaatggcaacaaaagccaaaattgacaaatgggatctaattaaactaaggaggttctgcacagcaaaagaaaccaccatcagagtgaacaggccacctacagtatgggagaaaagttttgcgacctccttatctgacaaagggcttatatccagaatctacaatgaactcaaacaaattcacaagaaaaaaacaaacaaccccatcaaaatgtgggcaaaggaaatgaacagacacttctcaaaagaagacattttgcagccaaaagacacatgaaaaaatgctcatcatcactggccatcagagaaatgcatatcaaaaccacaatgagataccatctcacaccagttagaatggccatcattaaaaagtcaggaaacaacaggtgctggagaggatgtggagaaataggaacacttttacactgttggtgggactgtaaactagttcaaccattgtggaactcggtgtggtgattcctcagggatctagaactagaaataccatttgacccagccatcccattgctgggtatatacccaaaggattaaaatcatgctgctataaagacacaagcacatgtatgtttattgtggcactattcacaatagcaaagacttggagccaacacaaatgtccaacaatgatacattggattaagaaaacgtggcacatataaaacatggaataccatgcagccataaaaaatgttgagttcatgtcccttgtagggacatggatgaagctagaaaccatcattctcagcaaactattgcaaggaaaaaaaccaaacaccacatgttctcactcataggtgggaattgaacaatgagaaaacatggatgcaggaaggggaacatcacacactggggacagttgtggggtggggggaggggggaaggatagcattaggagatatacctaatgttaaatgacgagttaatgggtacagcacaccaacatggcccatgtatacatatctaacaaacctgcacgttgtgcacatgtaccctaaaacttaaaatataataataaaaaaaattaacaggagacttttatacagataaatttgctttgcatcatgatcagcactaaagagcatcatagatttaaaccatattttcacagttaaaacaatgtaaccaaatatgcaatatattatgtaacattctacaagatgttttcaaacatgcaaactgacctttaaaacaattttgcataaaataacatttctaggtaagagaaaatacagacatgtggttagggcaaaatatttctgttcaaattacaaaatactgaatgacaaatcacaggatagaaaagaattatattgtacctggaatttgaagtcttcaaatttatttagatatacgtatctatatgtattaatagagacatatttaactgattataagtttagaacatttatattttaaagatgtcattctttaaaaattattaatatctacaggattgatacagatattttaattttaaacaaatatttttcactaatgtgaccagtatttatgtcctatttcattaaacagacatttcaagattttttagagttaatttttaaaaattaagtatcacaaatatttctgaagtactaccttaaaaaataaaactctttcctagcttttcatatagttaaacattttcataatgactaaaaagataaaaataaattagcaaccataattaaattagaattctactttttatatcagatgaaatactacataaaatgtccagaaaatctagtgttaatgaggctgtgcagcctggacatttgatgtctcatctgtgggaatgtgaactaacccaaccattctgaataattattgactctgtgtgttaacagtctagagtcctgaaacaaggatcttaattctaaaataaaatcctattctaagaatataccaagggttgataatcaaggaagtttcaaagttatagagaagaaccttcatcctagcattatatatgtaatcatccatataaaccacatagtgttgaatgaaattacagaaaaacaaagagcctacagaatatgtttctctttgtgtacaacagtaaatgtacacatctatccatgtaaaattttacatctcaggaagataggtaccaacatgttaacatgctatatctataagataagaaattttactttcctacaatttcatacacacacacactctcaaacatacatacccacacaccgaggatatatacacacacaaatatatatataaacatacatgtttatataggtacacacacacatacatatacacagatggtcaacaaattataatggttcaatttatgattttttttactttatgatgaagcaaaagtgatagctttgaatagaatataaccattctgcttttcactttcagtacaatattcaacaaattacataaaatatccaaaactttattataaagtgggttttgtattcaatgattttgcccaattgtcagctgatgtaagtgttctgagcacattaaaggtatgccaggctaagctgtgatattcagtaagttaggtattaaatacatttttaacttactgtattttcaatttataatcagcttatcaagacttaaccccattgtacattgaaaagcatttgtattgcattaaacatgttatatatatttttaattgaaattactggcaacttttgaaaaaatgtaatgaaataatgtgctttgctattggttaaagtgtttttgggcagggtcagtggcttacacctgtaatcccagcactttggtaggctgaggtgggcagatcgcttgaggtcaggagtttgagaccagcctggcaaacagggtgaaaccccatctctactaaaaatacaaaaatcatctgagtgtggtggcatgtgcctgtattcccagctactagggaggctgaggtgtgagaattgcttgaactaggcaagcagaggttgcagtgagccaagatcaagccactgcactccagcctgggcaactgagtaagattctgtcaaaaaaaaaaaaaagaaggaaagaaaagaaaaaaagttttcagcttcaagtaacagaatagtcaactaattaaagaaaaaaacaaggagcaacttttaccaaatcgcacaacaaatagatggtatcaatgcttacttaattcaacatgatccactttgtgattctcttatctttctacctatgttttcaagatggctatggcattcccagccttacaacttcatgtgacaaaatccaatggcaggaaataataagtgacggcattttggaactttaaggaaaaactttaaggattggaaaacagggatgccatatgtccagtaacatgggatagccgttcctaattaaggattgctgtatgtcctgaatgactttctaatgtaatgaaggtgaataacctgctttgtttaattatacaatcccaaatgtaactgcctaagtgccaagtacttttgcatggttttaatatgccatgaattttgcaagaatgaaactactatgtatatgagaaaagatggtagattttttcatttagatactcatttcagagtctcaataggaaaaacagaacacactcaaactaagataatttaacatgggtttatttccaaagagactacttacgaaaatgtcaggggagaagggtgaaggaatcacagaaatcacaccccacaataactctgggttagtagcagcaggcagagttctggggagtaaacttccctgatcacgcaaggaaacactaattttcttatgaaaaagattggtcaaggagacctagcagagagggagtttaggcaataacccccaatcccatttcctccttccctttaatctcatgaacatgcatagaaggcaatgagcaagggaacagattgagatattcaatatggaccattccacttggacaaaagccagtaaataggggagtataacaggggacaagggccaaacagaaagtatctattacatttaccaatgcagatcaatcatgtcaaaaacagcaatggcagttttggcatttggttattcaatgaaactatatttgtagttttttatttacaatgtttcaaggtatgggcgaagatatgaaaatatcattatgttctattttatttgatatgtaaatgttctggcacaattatatacattttggatcatatattgacagtaaattatttctcctttgttagcttcagcataacattaatattttcaacaacttgaatgcatacattgtgttctcactaatagtttagaatagtgaaggggtctttgaagaatttcttatgaagtagaggcattgggtcagacagagacgaaaaccattggcttagattaatcactatttatcctagggctgaagagggccaattgaagacacaaatgtccaatccctttatgaccttggagttctatgaaccagagaaatagagactggttcttaaggaggtaataagtgtgccttctatggtttataataatatgcattgtcttaacaatcgaatacttaaaagttaatgccctcataatatgcaaaatttttaataagcacattggtccctgtgttcaagtagttggtaatcaaattagcgaagtatggtaagtcttttgaagagcattaaacagcagagaatgtaagaaatttgtctctataatagtgtgggccttctgtgtttcctaagggcacattcatatgatctaataactgagcagagagaagcctaaaggatagtttttggtttcatttgtttgtttttccaattaacatacatttctagattaaaggtcaactatcttttccttgggagtcaactataggagaagatagtgaagaggcaaggaaaattacagcagctcaacagctttaccctggaaatatctgtattgtgtaccgctatagcctacctttatcagtcagataacaatgtcaaagaggcaagcttggcaccattgctcttagtgaatccctgctgccagccttttatcctaagtgctctccaaagacccatttaatggaccttcctgaaattgtgctcaggatcaatatgaggctcattgatacagcatttttggaactcaccatttgcttatttattaaacctgggatagttgcccgacttctatcatctgaaatcctctccatgactttcaaagttaccaacattggttccaacatcattcctagaaaacatttcagtggagtatatttatctgacatttgactgtatttatagcagtaagaatctatgatgattcctcccaaaataatcccacaattacacattttgggtcaccttgagggtcttatccttaatatcagagatctgttctatacatttgagtcttagaaataattactagcttctctctgaatttaactgaggttccttacttttattcagcctgttacctaaattacataatgtattgaaggctataaactgtccaaatttctgattacattgagttaaaaatgggaatatgactttctttttctaacttggcaaagattatgttttttttcatgaagaaatataggcatatttaaacactcaggatctgagaatttgaaatacatgaaacttagcaagtggtctttaagtagttttcatttctaaattatagtacataccattgaatgctacagaaggaaagacaatgagggattactcataaacattgcctttatgatatccttccaaagaaaaccaagtgtccctgtgcttggactcataaagcagaaatgcttaccttgcttttatgtcactaacaaacaattgtgcctagtcatttaattctaacgcatttaagccatctagagagtggagcccctagggaaaactacaaatggaaaattcattgatttttgattttgctttcctatggattaaatttaacactttcttgtaaatctctccctttacagatcatatgtgataaatagttatccaactttctagatgtccacccagagctgcttccatatgaagaggtggaaacggattctgtgcatgatactggttaggatcgggaactgtttttttttaaaggagatttttaaaatttgttttccttgtacacatagccttaatattgtgttgctaactgccctctgggaacaaagtcataccaatcacaaatacattgcctaaagtgggatggttattactctgctgtgaattgcacctcctattatgttttaaagatgctacaaacttgagacattactatgtagatgacattcccagcaaatccccaaacaacacttaatgagatttcaaataccaggatcatgaaacagtaagagatataaggaaataaagaaaaacacagtatatgtgtagaaggcattaaaacacaaattttataattacgaatgcatataataaggaacaagttttattctaaatagcaattatatcagaactacgatacagggaataaaagtgaatattaagccattgtaccaacaataacagagccccttttctgctgcgtgatggaatttagtgtttactaaggaagaaaaaaatgcaagatatcttaaatttggtactttccaacaaatttaagaaatgtgtacacacttgaggagacttaagaagtctctgactaaaacactagaaaagaaaagcagtgaaaaaccaaataagtattactcaacaataacaacatttgttactattatattaatattaaacacactattaagcaacaacatttcagttactcactgagcccaaagtcatttttcatgaaccattcacaacactgataacctattgaaaaatgattgaaaacaaaaaagcttatttctttccaagtccttttaaagccttctcttgtgtcatttcatataatccttataacaaatctatggagtatatactgactttatctctgtacagaaaagaaaactgaatcacattcagaataagttgcaaagatccccagataatcagtgtcataggtgaaatatgatgtcacagtgtactcaagagtaatttagggaagcagtacaaatgatggttgaaagcacaggttctgggataaatagcctgaagtcaaaatctagttcatatcctcagtggctgtgtgatcttgggaaatttcccttaactctctgtgtcttgattttatagtttcatccatttttgcctctcatatgatctggtgagcgttacactagtttatgcttctaggacactgaaaacagtgcctggctcttgataaatattaacaattttgtttcattttcttcaccttgagtatttcatggccagatggaaatcaatgtcaatatgaaaaaatgttcataattcagcaggaagaaatacaaaaccatataaacaactttgttttattggcaagtgtatttggaagctatgttaaattgagaaggggaagggaaagcctctaaggatatcgattaatcaatgactgaaagctgatgagacttgtctggaatttttttttggagactctgagacttaaaattttgacaaaataaggagatgaattgagtagtgtggaagagacattttctgaagtcagcagagaaaggagagacaaatatggtaaggggaaaatggtatgaagtaataatatgaatgaagtgctttctaaagtataacacatgtaagttgtgttaaatgtaaactatcatgattatatcattactgtctgactgatacaactatatccacctcagttagccacataagatcaattttcctatatcttagagaataccagtaacctccagttcagaaacagcataaatatctatccacagctgagcagacacatacagctagctaccagatgaaatgggctatatcttcaaatactattgttttccattttttaactgtggcaaaacacactcaacaatttgcatcttaaccactgttaagtatacaattcagtgtcattaaatgtattcacaatgttgtgcaagcatcaccaccacccatctccataattctttttgtcttgtaaaattgaaatcctgtatccattaaaaagtgactccccattccccgccctcccagggcaactacagctttactttctgtcttgatgaatcatacaatatcaaatggaatttttaagatatttaaaatcttttgtctggaagcgaagtggaagttaatatcaatggctatgccttcagtgagttctcagaccacattgcaatgtagttaactatttatcttttattacgttctagacctattatttctttctggcacaaaaatatcttctttgtagattatggcatttacctctatctccacacctttctgcgtctgtcatccacagatcatcagcctcttgcttagtctccatttaatgacaatttctatttagtatacaagagtccttccccccgcaatgcaatttcttcactctgaaaagctctgactctggctactggtctctgttatgtactcatccctagagccatgtcttcaaatatttctcagaacttcttcacatctaaaaatctaggattaatgtattgctctctgattatattcttctggtatttcaagtatcctgtataacttcttaatctgcccttgcttttcttctacatcaagatgtcaagttcatggacttcccaattaatcattttaaaaatttatttcaagcctttatgagtcactacaatgtacatatgttctcaggaattatgaccctacaatttgtatatgagaatagttcctgtgtcaggcattatggacataagagtaaataaattctagcccctgcctacaaggagctaattcccagcctaagacagattgtaagccaataatatgcagagttgtaagtctaaggaaactgattgggatgtacctaattcgagctgggaatatcagaagaaaaactttttgaaagtcatgagacatgagctgtgcctaaaagaataaaaatagagtgagaaataagaataaataaattagggaatgagatgggtataatagtagaaaaaggaaatctctttagataaaacagggtatgagagtatataggaggcttattaactcagtgtggttggagaaaacaggttgaaaggagaaataggggagaaagttacaaacggaatcaaatgtgttagtagttgagggaaaagcaaatattgaatacgacccatagatcttggataaaccagtgtttggtagtagcttacataaaaggttgtgacaaaataaccagagatatgtggagaaaataataactgagtgttatatttcctctcagtagaaacctaaaaaaaaaaatgtaatcacatactgatcttttaactgacctccacttatcttgctgcctggattggtatatatagtcctctgcctgaaaaattgctcaacacttttgaaaggttgtttctcactgttactcccaggcatttctgctaacaccagctgagttgtaaggggccctccaggaggcctaggttgttctccttatcacatatattattttcatttatcaatttacccagaacatctaatgaaatattatggacaccaataacatgaatacaaatacagctatagtccctaaaaagtaaattgatgtctcttgaaagactgtcatgtcttagatgctaaatttggagtatgtgtttctaataaataaatagcttgctttaataattctgatttatgaatgtaatataggggagcagcttttatttcatccttaatcttaaaaaacaattagccgggtgtggtggcgggcacctgtagtcccagctactcaggaggctgaagcagaaggatggtgtgcacctgggaggcggagcttgctgtaagccaaaattgtgccactgcactccagcctgagtgacagtgtgagactctgtctcaaaaaaaaaaaaagatcatacaaggagtaaatgatgatttagcataaaacacaacttgagcctaaaacacagatcatagggctcaaactttgttattttatgggattatactaaccagttaatattcaaaatttaccatttcaaaagaagaaatattggtctgggaaaattgccattgcttatacagaagaatggaggaatctttttgagaacaacaattctaatgatcttcttcatcactggttccaaaaccaagcccatggaaggcctgcatagggataatgtggagaacatgcaaaagaaatacacatcaccagctcctcaactcagagctccaagggaatggccaaggaagctgtattgtcctaagaaatttgagactgttttgacttacaataaatcctgctcaatcatatgtatgtatacacacacacacacacacacacacacacacacacacacacacacacagagagagacggtgttgtcagtgaagcctctaacattgcatcttgactggacagatttgacaattaaaatggctggaagaaaataggtttcataagtgtcacttactattcacattacacattaaaaggacatctcctaaattaaatcttgtctatgataaaaaggcagaaaatcatgacccaaggctcatttataactgcagaaatgttcaagatagaccaatgcttgctatgtttaggaagtgacaagaaagtacaggtctttataatctaccattttgccccttttgataccaggtgaccttcataatgcaggctatagagaattacaagatttgtcagagatttcaggtctttggaaagctatgctctttcacaagaacagccatggaaacaggaagaaagtcaattcccacttaaggtaatcagaatttacaaatattcctttcttcattgaaatctcaataggcacttcgatattatatttaattaattcttttgttacaatcatgcatcacataacaacattttggtcaaggatagtgcacttgtatgacagtggtgcaataaaatcataacactgtatttgtactgtacctcttgtatgtttagacatgtatagatacacttactgtatagatataagtaagtatagatatacttgactgttgtgttacaattgcctacagtattcagtacagtaatatgctgcacaggtttgtagcctaggaggaataggctataccacctaacctaggtatgtaatcagctatagcatctaggtttgtgtaagtaaactctgtgatgttcatacaataataaaattgtccagcaatgcatttctcagacacacccctgtcattaagtgacacatgactgtattagttaacactatgggaacttcatgggaaatggaaactctagctccaccataaatagaaactgtttatgtcaaaaaacacataaaagcatagttgcaagattacaattccttccagatatttcatttagtacctccacagatcattaacttcctgaatagcattcttgtgtttccactgcctcacatttgatttcaggtcattccatcaattgtcaaagatgcatccaacattaactttccaactactggtttggattgtgtcaacattgtcattctgggccacaacaacacaaaaggctaactcagtgaggtaacatagacactgatcagtgagattttgctgatgggtggtaccattttttaccaagatcaagggtattcataccttcaggcatctagataacattgaaaagggcaggttcatagataaaaagggaaagaggaagggtttttgcagtatatatgagctaccatgtctcctgtttaacctgagtctgaagagattcaaagtgcaggtgccatgaatgcctctttaatagctccatgtcgattgattttctgggctacacttcacagcattcaaattgctaaatgcatataaactagtagtggatatttattacctggatttgtgcttctgagtgaccttatctatagttatgtgcttcagtgatccaacttggggtgcactccaaactttgataaattaaagaccctgcatattccttgagtaatgctacactgacaactgatttagtgaatgccactgtgaaaataataaacctcttggtgaatatatttagacatgtcttggaacctgtacacatcttaaccagggatgttacttggtctttttatgttcaggagtgtctggagatagaaaaacatacaggattgtaattgttgcctgtgagactaacagaaaattcaagctagtgaagtatgtttatgcatggcacacttctcaccagcaattttaggaagttctacccaaaacccatatgtcttttgatatgtgggttaccttggagagagaaaaagaaactctgaacacaagcatgaaatactttcgaattttatctagagttggacttgtccaaaagcttttgtataaacttgcttgatgaggaactgttgtccactggtaccttcaccgtacaatccacacacaaccaaacttcacaactggacacctaaatttgcactttgtttggtaaagttgaatgaaaaatgttgtcttttaagcttatgttctcttatgaaagctgttattagattaattttactccaagatatgccagttaggaaataacttcccatttaatttcaccagctccctgtgggtggactaattactcatacatcacacttactctggtggtgaaatgcctcaaaagaaggtctccagagtgttgctttacctagaaggacaagaatgaagagacataaaaatcattcattaagaaggaagaagattttccttgcctagattttcacttgtaggatccaattaattttatcacttaatattttgtcctggtgggcattcactttacaaatttgtaaggtcagtagaaatggaaacttttggaaatcaaactgtaaatgttctgtagacgttgacagaaatagctatttggagctgcgcttttaccaactagacactctgagaaaatctgtgagaggatattttcaggaagtcattgaaccccctaaaaatcaagtttattgcttttaccataaatataaataatttatttattatcaaccactttcaatattcgaataagtaactttattgtttatttcattgacatgatctacatagacatgcaatttatcttcttttgcgatacattcagaaaatttgctgcctgaaaaagccatgttttgaaattaccacctgtttgatgattgtttttttatactttaagttttagggcacatgtgcacaacgtgcagtttagttacatatgtatacatgtgccatgttggtgtgctgcacccattaactcgtcatttagcattaggtatatctcctaatgctatccctaccccctccccccaccccgcaacaggccctggtgtgtgatgttccccttcctgtgtgcatgtgttctcattgttcaattcccacctatgagtgagaacatgcagtgtttcatttccacttaagtatctatctctatttgtcctttattttcacttccatcctagctctatcccttgtctccttcgtgtgtctcaggataagtgccctataacattttatacttctggaaacccttcaatataatgttattacatgtaaaaataaaaagtctgttttagcgaactctttcttcacaaattatcttttcctagttccctattagacaatttttgtaggctccatatgctattaatttatattcacttttagaagaattttcatcaaaagcaaaagtcttatgtaaattgtttatatgctatttgtacttctgtgtatatatacacgcatagccacatacatatatgtaactccagaggcctgcctggactgttaaataactgtattgaacaagagcaagaaaaagctgttcaaatttcaaacaacaagttgaactgaagagctcacatctttgaatgaaatagacactagtagcctttaaaaattaaacatttctactgttttaaaaaattataggcatcatagtatgaggaaaaaatgtaataatcctttttaattcttgccattttattaaccacggactccttatgccctgacttcattggtacccctttgagattaaacagaacaattaatttaaaattctgataaataaataaattgcaccatttacttgaggtactctttcacctttcaagaaatattttgagaattcattagctaaatattgctataatgcaggctagtaataaatagaaataatgatttcattgtaaagtttaaactaatgatggtatgatctggaatttttgttaacctagaagacataattagctctacaggtgaaatgaaagacaaaatcacttcacatattagtaaaaaacaaataatataactttataagctactgctgttcttttgctgttaagaaccaatgacatctgtaattagggaagattatggaaaggttaaaggtgagaatacatgcagtctatatacaggaaacccaaactgtttaggttaaggaaatgtctgcaaaagtcatattaattagcaggttcacaggaaactaacatttattgtataaattccatggtcaaatgtattagggctccacgcacacaactgtgcgccatctatgttaccacacagtgcttacttctttcagtctttattcatttctctcctaatggtctgtatggtattattacatagttgtaaaaaccttccatgaggcagaaatttcatttaatgatacagcttcaaaaataatgaaaaccagtagaaactttctatttttttatgaagcagaattattgaattttcagtttcatttatttaatgttacaagaggacaaacatatttctttaatttcttcttgttatttttgtctaacatcaaccaaagccatttctttcatttgaaggtgaaaactgcccatcaaaatccagtttaagctgagaaacaaagaactaaatttttcatgagacattatacactgcataaatataaaacaggaccagaaacaatggtagattagcaatttttaaaaagacaaaagcaggttatcatcaaatcaattgttaccaacaccccaattccacctctaggccagaaaattagccacttacccacgggaaaacaatgattgaagacaaagttcaccagtgaaagttggttatttttttccatccttgcatcaactaaaatgatatctacagttcctcttaacacttttcttactttcaaatatgtgggtatgcttcattagctgaggccatgttccatatgtacatctggctacaagggaaactgggaatgtgagccctgatcctaatgtttgtagagtatttagaagtttgagaattccctccaaataaagagttttctaaaacattgttagacaaaaagtttgaattacaaaatatggtagtagctcaggtctaaaccaaatgcagggaaaaaactattaactctaaaaaaattaaatacacatttgatggtaatgagaaacagaaaacaggcagaaatagtagaatactccactaatgatgaagtatttgaccattgaataaagaaaattgcaatgatttaaatttgcatcaaggcaacttcacacctgatgacgcttcccagtctgtgcaaaattagatgtctacgagtaaagcggtgagttttactagcttgaggaataagagcacagagttccaggctgacagaaaagaggaactgggaaatttgaatgacatgggaggacatctcacacaactgaaagtcacagaggagaatatcacagagtaaaaatctaaaatcagcacttcaacttcattcaaatatatgatggctgctacatttcacattcataaaaggagactccatagaatccagcagaaaacaacagctaaattgctagtacagagcagagatttcaaccattgcatatagctcaggagtgaaagtttggtgtttgactacggaaagaagactaatgttagaaaagagtcattcttcaaaggaaaataaacgaacctatctctacaaaatatcatacacataatctaacatataatttaatctgcctagacatagaaccaggaaaatatgacacacaacaaaaaaagtaaacaatggattaagacattgaaatggcccacacgctggaattagaatataagaaatttaaaataagctattataagcatattcaaggatttaaggaatagatggtcataagagggaatatatggagaatctcaacagagaagtaaaaatgataaagagataataggacaaattttagaactgagagacagagtatcttatataaaaatgtcattttatgtacataccagtaaattaaagatggcacaaaaaattatcagtgcacttaaaaacagatcaagaacaatttcccaatacagttaatacaaacgaagaaaaataataaaaatagggccagtctagcactaatataattggagtcctagaaagagtagagaagtaaatgagacagaaaaagctatttgaaaaagtaaagaccaaaagttttcctaattgtcagcatatatcaacttacaggtttaagaaactcaaagaacagaataaaaataaagagaaccaaatgtagacataccatagtcaaaccactgggcaaaaaaaagagtaaatcttgaaagtagctaaagggagggagaaaataatttacatccgtggaaacaaatagacagatgacctgtcatcagaaatgacactttaaaaagcaatgaaactacatcttcaaaagaaaactgtcaactccaaattctataactagataaagtaattcttgagaaaagaaagatttattcagataaaagaaagcttcaaacaattgtcattagcagaccaagatacaagaaatgcaaacggaaattttttaggctaaagaaagataacaacagacggaaattctgacctacaggaagcaaggagaagctctaggaatggcatgtgcataaacgtgaaaaactaaggcttatttttttagttttataacaaacaactgatgctttgaataaaaaattaagtgtactattgataatgtgtgtaaaatattctaaattaatagctctgacaggagactaaacgcaacaattttgccgcaacttttccttatgttacatgaaaacgctgactattaacactaagtggactgcgataagcccaggatgtttattataatccctagagaaccaccacattatatgaagatattcttctaaaatgccaataaaggaattaaaatggaacgctgaatattgttcagttaatataaaaaggcatgaaagaaagaggagcaaaaaatgatggagcaaatagaacataagagcaaaataggctgggcgcagtggctcagcctgtaatcccagcactttgggaggccgaggcgggtggatcacgaggtcaggagatcgagaccatcctggctaacacggtgaaacgccgtctctactaaaaatacaaaaattagccgggcatggcggcgggcacctgtagtaccagctactccggatgctgaggcaggaaaatggcgtgaacccaggaggcagagcttgcagtgagccgagatcccgccactgcactccagcctgggtgacagggccagactccgtctcaaaaaaaaaaaaaaaaaaaaaaatagtaggcttaaatccaaccttttcagtaattatttcaaatgtaatttaaatactccaaataaaacacagattgtcaaactggataataaaagtacctataagagatgcatgccaaatattatggtatagataagttgagagtaaaataatttccaagtataccaaggaaacaacaaggacaagaaatcttatgtggctatattaatataagaaaaagtagacctccaaacgagcaatattacaacagacagctatttcataatgacaaaatgtcaagtaattatgaagacataatgctgtattgctgacagaataactaaagaaaattaagataaaataattttgacaacagcttgacctaatcgatattgaccaaaacaatagaatatatgttctattatgctacacatgaaacatttatcattaggctatagaccacaaaatatctctcaagaagtttcaaaacactgtaatcatggaaagtatgctttctgaccataatgaaaatgagttgaaatgggtaaaaacaagctacccaggaaagtctacactattggaagatttaaatacaccttaaaatgccctttagctcaatgaagaaatcataagaaacacctttaaatacattgaactgaatacaaataaaaatatactatatcaaaatctatgggataaagttaagcagacccagagtaaattttttgtataaatgcttattctagaaaagagaagttcaaaacaagtgaactaatttctaccttaaaaagaaaatctaaaacaagagagcaaattaagtccaaaacaagtagaggaaaggaaataaaacagaaattagaaatcaatgagacagaaaacagaaacaggagaaaatcaacatggccaaaagttagttctgtgagaaagaaagaaaatgcaaattatacatatcagggattaatgagattgtacagttgtagacacaagagacattaacaagataatggaatattgtgaaacattatatacaaattttcattacttggatgaaagggtgacttccttgaaaaaaacttataaaaaatttcacaagatttaatggaacataggaagtaattgacatttattaaagtaattaaattaattgtaaaatacctgcacataaaaacataaaattaaataaataaaaaaataagcaaaccccagatctaaagaatttcactggtgaattctttcaaacgtttaaaaaaaataaaatttttaaattatttcagaaataaagaagggggaaattccaaacttgttttatgagtcagaatcctgataccaaaattacaaaacctaggaatgcaaaattgacttcaacttaaagagctatcaccattctaatctgtgattctaatgaatttggctatcttagatactttatacaagtggaatcatacagtttgtccttctgtgactgatttactttacttagcattaatgtcctctaggttcatccatgttgcatattgacgggctttcttgttttaaagctgaataatattccgttgtatgaatataccacattttctttatcttttcatctgccaatagacattaaccttattcccacattttaattagtgtaaataatgctgcaatgagcctgagaatcatcccaatctccattctttaagataaataacctgaagtgagactactagatcatatgctagttctactttcttaatttatttgaggaaccaccgtactgttttccatagaggatgcacagttttactttcccagaaacactgtagaagtgttccaatttctccccattgttaacactcgttatctttttcttttaataagaccattctaaagggcttgaggcaatatctctttgtggttttgatttgcatttccctgattagtgatgctgagcatttttttcatgtatctgttggtcatgtggatattttctttggagaaatatctattgctgatttaaaaaaaaaaaaactctcagcaagctagataaagaaattttctcgaagtgatggaaagcatccacaacaaaacatataaacaatactatatttaatggtgaaagcgtaaatgtttaaaccacatagattaggacaagaaagggatgtgtgtgttcatcacctctattcaacattgtactggtgatcctagattttgagtataaatatttaggggacaactattgtcactgaagcccaaatcttggtcatcctcagaaaaaaaaaaaagttgattaggttgtatataatctaattttacttgctaatttaatttctctaaaattgcagcttgtatcaactctagaatttattgggcacctcctaggacataaacactggaatttggtgagagacgtcaaataggaaagaacctggctctgacataaattcaacacacggagggggacacatattatgagactgacctggcctcttcatctcataaaaggggttcttgttgcttgtaacacagattaaaactatttcaattacattcaagataaaaagattaacaatggtatgtaagatgaaaaaatcaccccgcaggaagacgaaagtctcacaaaaggatatttaagctagccaacactttgaaattcaggcagagatcgtgatttctgggtgaactaaagtagcaagaacaaagtagaggctccaattctaggaaaaatgggtcctaataaggtttacaatccagaaactcaagatatccagacagaaggatgcagtctcagctttcaaggcagcagcagtacctggattactaagccaatccccaacacaatcataaacacaaatttgattgaggaagaagcttgcccaccagaagatttaggttattacaaggtagaatgtgatagagaaaatgagcatgggactggaaagaaaaggaggtagccccatgattacaactggaatatatgtgtcagcgatggtgcggaaataagactgaagagagagatccttaaaccccacgtgccttacatcaggactaatcctggacacaggctggaaagcatagcctacaggtggtgaggcaggaggagtgggctcagctgtgagaaggagaaggaaatatggctgaaaactagataggggtcttgaaatcacaccgaggatttgggcctttgctgctgtctgccagcagctgccagtagttctcacactttggctggcaacaaaatcacctggggcagtggtgcggaagcggggggagtgttgtaaaaccacaagtgaccaggcaaaaaacacctgtatgttttccaattcagtaagtacagaaatattaattggaaaaaggtggaggtcagacattgatagtgctgtggactgctccagggacgtaagcatgatctttagagaggtgactctaatcaattgagggcaaccactggacagaaagaggtccagaccaaccatacacagagacatcatacaactacactttagcaacctctccaaataacatgtctcttagtgaaacttgggaggttgaaagttaaaaacataaaatccagtggcatttatgtatcctaggcacttacatttgtctgattcttccaacttgcctttgcttggttagagttttgggtagataagaggtggatttacatgtgctagtgtgagaactttgatacactcatttagacattgacctactatcttgtttgaaagctaaaacccaaagaaatttgtctttttacataaaacaaattcagcccttgccttccttgtagattacatcttccactagcagtaataaaaaagtaacaatatgcataagtcaaagtatcttcttagatcctctgtagtgttttattatttagttgtgttaattaaagtaactgtctcaaaatttcaaggaatgcctgagaagaaattcatgttcaaaggctgccctcttgtgacaatgtgttgtatgctttactgtaaaagtaaccttattttaccttataacctctacaatccaattcataacagcataaaaaggaaacaaaaccttacataattttgaattttaaaaagtaccttgtttatatggctcctttagctaatgaatagtcaatttggtaaatattccagtgagttgaaggtttgaatctatctcacttaactagcttgatgaatgtatttctaaacctatacaacccactcctctgcttttaaaaaattaaagttagctgtagattgagatgtcagtgacacagtttatagaacataacttagattgtcatctacattactgtaactacaaataccaccctcagatggaagaataagttttatcagtgaacatctctaattgaactataaatggtgtatgtcttctggtttttacaagctcttggtctaacacaggggatatatgatgtaaaaattacaaagcaaggtcactcacggtggctcatgcctgtaatcccagcactttgggagaccaaggcgggcggatcacaaggtcaggagatcgagatcatcctggctaatatggtgaaaccccgtctctactaaaaatacaaaaattagctgggtgtggtgacacacgcctgtagtcccagctactcagtaggctgaagcaggagaatcgcttgaacccaggacgcggaggttgcagtgagccgagatcgcaccactgcactccagcctggtgggagaacgactccatctaaaaataaataaataaataaataaataaataaataaataataaaatagcagtgactataatgttttgtgatgttaaactttgagagcttttttttttctttcttttcccaagtgcctttcccagttccaggagcagagttattctaagcccactgatgtaaaggaatagaaagaaaaggtttgttggaaaacctaataacctgctttctgtcttttgttttttaaaagcttgagcatttgggagaatttggaaagattgtggagtaagtgcaaagaaggaatttgctaacaaaaatcatataaggtaaaatgagttttttccaggttagaaaatatccactccctaccctcctacattcctttcccatggttaagaagaggaaaaaacaaaggcctcttggtgagcagtggtgacttaggcagtttcttagaaatattctagaaggcatagtcatcttttaaaaaaaaaatagctacaaggatatgtctaagcagaagggtccatgggccaaattacgtgtagatttttgcattccaaatatggtaaagaagaagcaggaagctggggctccttaacaggtcacacagaaatggacaaggaagaggccagcagcagcttgtggggacaagatgtcaagccccaaatgttaaacccaccaaccatcctccaaattctggctctgtttaacaaggctgtggtctgacactacatgccgcctcagtgactaaagcataatttcccgtctcctgggagtgttgacagctgactcctggcaacaatactcacagcacagtaaagttccttcatccaagttcatgtcccttctcaaggcatcccacatccgagaactgcttggtacagaaatataatggcctggttttcttgctccaattcgaggtctttaggtaaactcaccaagatcttgtagagtggactgcggccatgatagtgattgcattccagccgacttcctgctccacccaatcctattgctttcactcttccacaggtgttgggaatatcatttcaacctccttgcatgcaaatctccaactcggagtcggcttcctaggacacctgactggtgatatctctatcactatcacagtacttagaggggagcatcttaaaatgattgaaggctaactgccctaacagcacagacagatgatggcttaaaatagaatttaagtggatttaaaaaaacatgaaaaaagttgacattgcacgctcatatgagcttatggatcaaaccatgtgtatgatttctaagatccctcgtgcagtatatatttgcactgtttataaatgacatccccttgaattgaattcagtgcaattcaaaacagtaatttgtgggaaaaattagatatgcagatagcctggactctagagaagcacacatcatttggagaataatagtgaaccggctagtctatgagggaagaaaacagagtgaatatagactattagtgaacaaggatattttcccatgtatattcaaattaaggtgaacttctttagagaattgtgccttagaaagaaaaagtatttccctgtatttgagtcctcacaagttttcctacgatgagtgcttttgtgattattttgaataacaaagtaatatttaaagaaactctcttgccctgaatgtactttaatttatgtcaattgatgttgcatatagagatcatcagagtcaagctacaagaaaaagaggaacataacttagcaaagacttagaggattagtcctaatagtgtgaaatcaaaatttcaagtgagggaataaatgcagcttttaatgattacttaaatgaagtttaactctagcaggatctacaagaaattggcaacctttggcttcagtaacagaaactcaggatatatgcccttcagtgagtttgcattctgcatcatactgagagacactcctttaaacagcaataagaaacttcctgtgacaacataataaattcaaaaagttctgtaactcagacagtttagatagaagtgataactttggcctataaagccctgttcaccctaaagatggattaaacaatgaaaaagatattgatatcaaaagttcaatcagtaatttgattaaagcatttcattaaatgtgataatttcttagtatattatcttacatatgcaatattcatgtgtaacaaattatatacaagtaaacatttgaccatattatctgcagcataatttacatatcaatttacatattcagttttgctcacatgaaaacttggatcttctcaataagaaaatttgtgaaatctttaattcctcatccccaggaatgtaaataaataaatataaatactgtaagtcagtgattttttcctaggaagacagtaaaaatactttacacgccttctcattgtaaacctaaataacaaacagagaaaggctctctaaaggaaaaagacacatcttagggaggagggcactgcaatgggaatatgcatgacaaagcaaactatatagattcaaatggtaaaggaagacaaggactttaaaagaaaaatgatcaacctggaagtatgggggagtagaaaaaaataaataagggaaaatgaagaggcttctataattgttttgatatagttacctttgactataaagatcaacaacaaggtcaatatcagttgaagtttgggcaggcggttgctggatagatgtcctcacagaagtgtattttgtgtaaggttgctatggcctttgtgcaaggttgtggtttttgtggtattttgtaatagtttttatcaggcctagaagcatgagaaccctctcttcaaggccttctctgaatctatttgttcaggtttcttcttctctttttaaacattagtgacagttttgattctgataactttcatatcatgatccctaatttcaaaaaaaattaaacgtgtaacttatttatgatgtatttgataggcttggatttgtgaatcacctctactatctatagtggtagatatatctgagcctgcttacacaggacttccatcagattctctcttcagtggaattggaagagggggttttggagaagggaatgaaggaattgtgctgcatcagaggtccccacctaacagcacagggtctttttctgtgctcttgccaggccgttgtattggctgatgcaaaagtaattttggttttgtcattgaaagtaatgagaccatctgacttacaatgtctgtgccataaccagctcctaatagcctccgaggacagctttgccctgacatatactgtcctgggaccacgtctgctttgtaactcctgaggtagctgccaccatgaccaatgccttctcatctttactctacatgcaggtaacagttataattatatctctgtgtattcacagaacatttagtacatctgggacttctacaaaatttccctagctgattttggtgttctggggtactggcagctctagccatgaagggatgatgctttatcagcatttctgttgagttttttgctttttctcaaaaactgattccacttttcccacatacgtttgacaattcatttgaactcatttattctaaacccattatttctggtctattatttaataggaagggaggcgagggataaaagattacaaatagggtgcagtgtacactgctcgggtgatgggtgcacccaaatctcacaaatctccagtaaagaacttacccatggaaccaaataccaccgtaccccaataacctatggaaaaaaataaaaaataaagtaaaaaagagtcagaaagaaagaaaataatcactgtacttcccaagacacttagaaatggtgactagcattatttgtaagtgtcacctaataatattattattttttctttatgctacaaactagctctgatattacaatcactactatttgaagtgttactaaattaaattaaatgtattgtatccttctggactcagaaatgggggtaaatgctaagacaatttcagaatatgatcacatattaaaagcatattatatggggaaaatttgatttttaaaaaatagaaattggtagagaaacaatttttgggtctttaatgtacgcacattttgcaagtatggacgctgaatttattgttccaaatgattgttttcaagcatgtttgtatagaaaacagccttggaatagaaaaccagtacctccttctggaacaaaggaaaagtttatttactgtctagtataatgcagataatttctccctcttgggaagcatacagccaagtgaacttccaataacacaagttggggtttcttgagcttgggtttttcttccacagtgtaatgtgcaggtgccacttggctctctttgtgttatcctgcgaaagctgatggctataggtgcatgtgtttattttgggtttctctattatgtttcattggtctttgtgtctgttttcatatcagtaccatgttattttgtctactgtggccttagggtatagtatgaagtcaagtaatgtgatgtctccagctttgttcttcttgcttagatttcctttggttgtctgggctctttaaaaatccatatgaaatttagaatattttttttttctgattctgtgaaaaacgacattggttgtttcataggaatagtgttgaatgtgtagattgcttttggcagtatagccattttaacaatattgatctttctaatccatgagcatggaatggttttccatttgtttcgagatctatgatttctttctgcagtgttttgtagttctccttttagatatcctttacctccttggttagacatattcttcctttattttattttattttgggggttgctgttgtaaacaggattgcactcttgatttacctttcagtttaaacatttttggtgaacagaaatgctacttctttttatatgttgttttttttttatcctgaaagtttgctgaagttttttttatcagttctaggagccttttggcacagtctttagggatttctaggtgtagaatcatatcatcagtgaagagagataatttgacttcatttcctatttggatgctttttatcgctttctcttgcctgcttgctctgactaggacttgttaaacaggagtggggagaacaggcatccctattttattcctgttcataaggggaatgtgttgggagaaaagctgagtgttggaagacaagctgaggcagggccatatgtttctcattcacttgatacaccatttcctttcaacccccacatcctcaccacctgtttctttgtttgagcaccaacaaatagcgtgggctcccagagcttggggactttgcagactccatactcgtgatggtctcctggtcccactttctctctcaaactgtctttttctcattcctttgactctgccggacttcatcacccccatgaccaagtgttgggtctgatcaccccaacattcctggcgcccaacatagggtgacaaagacccggtgaaggaaggctagagcatatgaaagcagaggacacatcatcaaaagacacccgaggacatacaaagatggggagtgaaagttagtacttagaatttgttattactctttagtacagtaaagcagttttgcccatggtttccagaacaaaggactatgcagttggatgaatgggagagaattggaagagatttttaataggcatataaagatggagcagaaattccagtttatatatggtcagtgtgggcactaataaaggcagcccttgagccatttcaaacagatgatgaggcagattcagatgaggaagaggaggatgagtgtaaaaaactaacttcaaattctgagtgtgaggagcagctaccggaggagattaaagaaaagaaagaaaaactttaaaaagtatgttttactagcccgttggctccacctgctgaattaagtgaatggccacctcctctctctcccctaaatgggtgagaaaataaattagctgaaaaacttactgctcctgtagttacaacattaaaacctggagcagttggtggtgctagacaaaattctattcaaaaagctaaagccaagggagaccttgaagcatggtaatttcccgttactataatccagcaagtaggacagaatatagctaattagcctgctttttcttctaagttactaaagaatttaagcaagccattagtcaatatggactgaactgtctttttgtgcaatctttattaaaaaatatggctcttgataatacattactaccatataattaggatactttgacaaaacctgttctcactcccatctcagtacttgcagtttaaaacttggtaggctgatgaactcaaactcaggcaaaagaaaacacacacgtgcagccacctgtgcctgttttctttgatcagttaatatgagttggtcctaactggggttgattagagaatcaagcagtaatggaagatgttgccattattcagctgtgcttcatgtgcttacatgcatagaaaaggataaatgttacaggggaaaagtatccttatttaagttctgtctgacaaggacctaaagaaccatatattaattctattgctcagctccaagaggctgtgtataaagccgtaaatgatcaaaacagctcaggatgttgtaatacagcttcttgcatacaataatgctaatgcagagtgtcaaactgctattagatatctgagagagaaggctcatttaactaaatatattaagtcttgcgatggcattggaggtaacttacataaggctattcttttagctcaggctatggctagattaagagtaagaaaaaatatgcttcatttctcaggctcttgccttaattgtgggcaaattggacacaagaaaggaatgtagaaaggaattcaaaagacgaaaactactaccatgaatcaacagaaaagacccagtgtatgtccctggtgtaagaaaggcaatcactaggcaagtccgtgtcattctaaatttagcaaagatagacaacctctttgaggaaataggaagagggacccgcctcaagcccctcaacaaactgaggcatacccagcacagccactgcccttacaaatgtacagcaattgtcccccgcctcagcaagcagtgctgctgtagacctctacagcacaattcccatctccttacttcctggggagccacgaaagaaggtccccacaggagttagggcacccttaccctgaggaactgttgggaacaagcccccacaaatccggccataaactggccccaaaactggccataaacaaaatctctgcagcactgtgacatgttcttgatggccataacacccacgctggaaggttgtgggtttaccagaatgaggacaaggaatacctggcccgtccagggtggaaaaccacttaaaggcattcttaagccacaaacaatagcatgagtgatctgtgccttaagaataagggatacttttagttaatctaatatctatagaaacaatgctaatgactggcttgctgttaataaatacgtgggtaaatctctgttcagggctctcagctctgaaggctgtgagacccctgatttcccacttcacacctctatatttcagtgtgtgtgtctttaattcctctagtgctgctgggttagggtctccccaaccgacctggtctcagcaagtggtgcccattcatgggggctcgaatacaggtcaaaggatcgctggagcaacgattggagaatgtggaactagctggaggacatccgagtactcttaaagcaatccccgtggtgagtcagaaggggagctcggaagcatcagggtaacaatgggacaagtgtgggctgtggttcgttctaccttggaactttttcacactgataatgaggaggaaggagagtatatcaaagtaacagtagaggctacagaccaggtttatttgccacctaaagctaaagcagaaaaggagggagaggttcatccctacccttctgcaccccctcattattattttgaagaaaacgaccctccagatatttcttttctggaggacactgggtgaaaagtagttgccctggtgactgttcgagcaccgccttgagcgactgcttagttctattcaggcaggaattcagcaagctagacaaaagtgggatttagaggcttggcagttccctgtttgaatacaccccccagatcaacagggaaatattatagctacatttgaatcttttccttttaaattactcaaaaaaattaaacaagctataaatcagtatggaccaggttctccttttgaaatgggactgttaaagaatgttgctgtttccagtcggatgattcctactgactgggacactcttactctagcttgtctaactcctgctcagttcttacaatttaaaacttagtgggcagatgaagcttccattcaggctgctcgcaatgcctgggcccaacctcaaattaatataactgcagaccaacttttgggggttggtggctgggctggtttacatgcacaagtagtcaagcaggatgatgccatagaacagcttagaggagtgtgcattagagcttggaaaaaatcacttcatatggagaacaatacccttcatttagtgctataaaacagggaccaagagaaccatatgtgcattttatagcttggttacaggagtctcttaaaaagatgattgcagatttggctgcttaggatatagtgttgcagttattagttttgacaatgctaatccctattgccaggctgctctgcgacctatcagagggaaagcacatttagttgattataacaaggcctgtgatgatatcagagataatctacataaagctactttgttggcacaggcgatggcaggactgagagtggataaaggaaatactctatttcctggagcttgttttaactgtgggaagcatggtcatactaaaaagaatgtaaaaaaaaaatcagcaagtcaggccaccagataggtgaaaaaagaaaactgctgatcctgaaatatgtctaaaatgtaaaaaaggaaaactttgggctaatcagtgtcactctaagtttgataaagaagggaacccgattttgggaaactccctggggggcccattccaggccctgttctaaaccagggcatttctagctcaggccattccctcacacccgtacattatctgtcccccaccatagcccatagtgtcgcagtagacttatgctgcacaaaagctgtgagccttctgcctggggaacccccgcaaaaggtcccaacaggagtctgtggaccgttgccaggagggacaatgggattacttttaggaaggtctagtttaagtttaaaaggggtacaaatacacactggagtcattgattcagattacaatgaggaaattcaaattgtgatatctacttctgttccctggaaagcacagccaggagtgggcatagcacagctcctgagtgtgaagtatgtgggaatgggaaaaagtgaaattaaatgaactggaggatttggaagcacaaataaaaaaggcaaggcagcttattgggtaaatcaaattactgataaacatcctatctgtgaaataactatccagggaaagaactttaaaggtttggtagatacaatttttttttttttttggtaggagtggacatttcaatcatttctctacagcactggccgtccatgtggccaattcagcccactcaatttaacacagtggaaactgctaaagccccagaagtgtatcaaagtagctatattttgcattgtgaagggaccgatggacaacctgggactgttcaaccaattgcaacttctgtacctataaatttatgggggagagatttattatgacaatggggagcacaagttctaattccatagcaattatacagccctcaaagtcaacatatgatgcacgaaatggggcatgtccctggtataggagtagaaaaaaattgcaaggtttgaaagaactgcttcaaacggaaagacaaagttcctgccaaagattaggataccatttttgatggtggccactgttaagcctccagaacctatacctttaaaatggttaacagataagccaatttggatagaataatggctgctaagcaaagagaaactggatgctttagagaaattagttactgaacaattagaaaatgggcacatagctccaacattttccccttggaattctccagtgttcataattaagaaaaaatcaggtaaatggagaatgttaactgacttaagagccatcaattcagttatacaacctatggaaacataacagccaggattgccttctcctactataattccaaaaaattggcctttaatagtcacagatttaaaagactgttactttactacccttttagctgagcaagactgtgaacggtttgcatttacaattcctgcagtaaacaacctgcagcctgctaagcgttttcgttgtttcacagatgggtctagtaatggtaaagcttcttattctggatcaaaaggtaaagttttccagacaccctatacttcagctcaaaaagcggagcttgtagctgtaattgaggtattgactgcttttgatatgcctgttaatgtgatttctgattcttcatacatggttcattccacacagttaattgaaaatgctcagttacgatttcatacagatgaacaactgataataaaaacaaaaaaagggggagaaacagggattacgggtagcccatacacaattgaatctatcattattaactttcaaatttttgagcctgcccaaaggccagatgttaccagcagctgaacagcatctacagaaactagctgcaaagagagaagcagaacaactggtttggtggagagatccaataacaaaaagttgggaaataggtaaaattataacttggcatagagattatgcttgtgtttctccaggaccgaatcaacaactgatttagataccatcaagacacctgaaattttatcatgagtcagatgctgaggaagagataaaaagcacaatcatcattgaaattagagcttctggctgggcgcggtggctcacgcctgtaatcccagcactctgggaggccgaggtgggcagatcacaaggtcaggagatcgagaccatcctggctaacacagtgaaaccccgtctctactaaaaatacaaaaaattagctgggtgaggtggcgggcgcctatagtcccagctactcaggaggctgaggcaggagaatggcatgaacccgggaggcaaaacttcaggttttgccaagaatgacactgtaaatgtaacaaagcttctgtgcttgttagtgaacaccaaatcagctactctcctgtattcggagatcaggatgaaatgaaaagaacaagcaggccgggcgcggtggctcatgcctgtaatgtcaacactttgggaggcttcggtgtgcggatcacccgaggttgggagtttgagaccagcctgaccaacatggagaaaccccgtctctactaaaaatgcaaaatgtgctgggcatggcggcacaagcctgtaatctcagctttggaggctgaggcaggataagtgcttaaacctgagagggggaggttgctgtgaggcaatattgcaccattgcactccagcctgggcaacaagagtgaaactccatctcaaaaaaataaaaaataaaaaaagacccccaaccttgtctagactgtggggtttcagtttcaccccaggggggtcctggttgggttagaatcctgaatctcgtttgagttcgaaccctaaagaataaagggaataaaggctgtagctactgagctactcaatctggtctggttctggcttttgtgtgtctatctgtatttttggtctaaatatttggcccaacagaggttaaaggctttgatgttctcagcaaaagccttgtgagatttctagtttatctgtgtgctcaattggaacaaagagactcaataaactagaaaaacctaaagaaaatggcacacgtgaaaaattgagagccaactcctgtttgttgttctgtccacctccctctctcactcctccttctgcctttgctgtggtcccatggtgtttctgtctttccggggacctgagattcagtgtaggagtgaagtccatgattttaaagccttcatgtctctgctttttaactctgcctgctttgctgagctcttataatgagaaataaactattcagaacaggtacaacagggcatcagaaaaccaacttcaggcagcgctccggcaagtacctccctagaggggaagggcttactaaaggagatttaatcttgaaaaggccaaaatgagaagctctaacctttagcttgctaggttttctgggactcgagctggctatatattatggaccattctagccacacacacacacacacacacacacacacacacacacacttttttgagacagagtcttgctctgttgcccacgctggagtgcagtggtgcgctcttggctcactgcaacctccacttcccaggttcgagcaattctcctgtctcagcctcctgagtagctgcgattacaggtgtacgccaacatacccggctaatttttgtggttttagtagagatgaggtttcactatgttgaccaggctggtctcaaactcctgatctcaagtgatccacccaccttggcctcccaaactgctgggattacaggcatgagccactgtgcccagcctatatatatatatatatatatatatttatatttatatttatatatttatatttatattttttttctttttctttttgacacacagtcttgctctgttgcccaggatggagtatggtggtacaatcgcggctcactgcaacctccacctcccaggtttgagcgattatcctgcctcagcctcctgaatagctaggactacaggtgcacaccaccacacccagttaatttttgtattttcagtagagatggggttttgtcacgttggccaggctggtctcaaactcctggcctcaagtgatccacctgcctcagcctcccatagtgttgggattacatgaatgagccactgcacctggtctctagtgcacactttaaacctgacggccaaattacatgaaagaaaattcagaactcaaatagttactatttttaaaaaccctaaaatgaaaaagtctcagttcttttgcctatctttttttttttccctgcctactttgaatctgctgatttgtctactggtgttgagataagacttactgtctgtggtgttaccaattcaaggttacttggctgaagaaaaacaaaagaatgaaacaattttttatttttttctctttttgagacaaggtcttactctaaggtcttactctgttccccagactggagtgcagtagtgggatcatagatcactgttatctcaacctcccaggctcaagcaatcctcctgcctcatcctctctagtagctgggacaataggcatgcaccaccatgcctggcaattttttatcttattcttagtagagattggatctcactctgttgcccaggctggtctcaaactcctgagctcaagtgatcctcttgcctcagcctctcaaagtgctgggatacaggcatgaaccactgtgcccagacaaaagagttcttttataaatgcaaataatttaaaaagtactgataaaataaaaatagaaatgtcttcagaattgtcagcatacatttttgactgtgttttatatttacatttgctagatattttaaggtgctagggtttggcatgaaggttataaagctataaacacaggaaaaaaagaatatttgtttatgtgattttttaaatacataagaccaatttaatacggtttgttgaacaaaaataatggaattttctgagttattggtaaaatacccttgtatttaactttgaaatcctcacttatgtgaacacctgatattcacaggctataacatggttaacaagaaaataacctagaaatgactagctttgtctaatacctcagttctcacaaatactctagataaactgtcaaaaataagtaaatgtaaatggataaatgtctatacaagacattttaatgtatttttgaaatttttttgagccaatgtctctgcctgtcacccaggctgaagtgcagtggcatgatcacagctcattgcaaccttgacctcctgcactcaagggatcctcccacctcaacctcccaagaagttgttaattacaggcatgcaacaccatggtcagctaacttttattttttttgtagagtcagcatctcgctatttgctcaggctggtctcacgatactcctgccttggcctcctaaagtgttgggattacaggtgtgagccaccatgcccagcctatttttgaaattttagttatgttaaattaaataatagatactcattaaatatctgggttatttccaatttaaaacttatgttttagcccaggcactatggctcatgcctgtaatcccaacactttggaaggccaaggcgggtggctcacccgaggtcaggagctcaagaccagcctgatcaacatggtgaaaccccatctctactaaaaaatacaaaaaattagccaggtgtggtggtgggttcctgtaatcccagctactcgagaggctgaggcaggagaattgcttgaacctgggggacggaggttgcagtgagctgagatcacaccattgcactccagcctgggcaacaagagcgaaaatccaccttaaaaaatatgttttaggaacacataattctaaattatgaaatcattctcatatgtaagatactgctatatgacaattcaagatttctttcttcctaagttttttattaaaataagggttactaagtgttaatatcttggtagatatatgtgattaagactactagatacaagagaaacaattctgtatgcaaaatctatacgggtttttgtttcagagaaagtaaattcgcttagagatttttaaggattattttaaattgaaggaataaaaaagatagataaaactaaatgtgtataaaaagttgggaaagatggaaaaaattatacaagcttattaaaagtttatgtaaatcttacctcgaggtcaaaactgattgagatcagatagattgtttataaggtttatttaaattagctgtaatattaaaaacatagtgataaaaaacaaaaaaatttggttaaaacaacaaggttttcttaatgcatttatttgctcataataagaggtaataaatattgacttttaatcctgatatctgttactataaaatcttttcagatttgtatatcagaagttcaacgtttcctgtactttcatgttacacatgactcacagatcacatcattgtcttctgtttcttcttgagaaggaataaaaggcttgggtttcctgcttggctgggatgataactccttcagctttttcatcaggtctaattttgtactcttggcttttaaatatgtcttaattacttcatgtaaccaggatacagcaggaaacttccatgctatcattgtgagctatggatccccactgctctatgctctggttttcctgtttacattcctctgtaatattatgctcactcatgaccctggacacactctttctatgtctaattaaattcaagtctccgtgtcatcggtttgacttccaagtgatttaaattagcttcccataagaagacacagttatgccacaggagcttttaccctttaaatgactggcctgtaataaagattttaggttttatcaagataatccatgtgttgcctttattgtttttttaattacttgggaaaactgagggttttcagttttcacatccatgtaaccttctatgttgcttttgatgtcttttggttgtcatgttaattaaatgaatgttatttaaaaatgacatgtggctgtgtgcagcggctcttgtctgtaattccagccctttgggaggccaaggtgggtggatcacttgagcccaggagttcaagtccagcctgggcaaaatggcaaaaccccatatctactaaaaatacaaaagctagctaggtgtggtagcaagtgctcatagtcctggctacttgggagactaaggtggaggatcacctgagcctgggaggttgaggctgcagtgagccatgatttcaccactgcactccagcctgggcaacagggtgagaccctgtctcaaaaaaataataaaataaaaaacaataaactaccattccgttttggtcaaatgttttcaattttttgacatctttgctaaaacttagttgataacattgtatgggaagcattgccaaaagataagtaacactaaatcttctttttttttttctctgagacagaatcttgctttgtcacccaggctggagtgttgtagcatgatctagtttcactgcaaattctgccccaaggttcaagcaattcttctgcctcaacctcccaagtagctgggactacagacaagtgccaccatacccggctaattttgtatttttagtagagacaagatttctccatgttggccaggcaggtgtcgaactcctgacctctgatgatctgtccaacttggcctcccaaagtgttgggattacaggcatgagccactgtgcccagcttaaatcttcttttggttacatttataggtatgttattaatataaatattttaaaagttatataaattataaaaatctaatagggtttcagtcataattttgatgatgttaaatattttctaaagttgtatgtgtatagatatattattaatataaatattctaaagattatataaaatttctggaagtctgatggatctgatgtgttgccatcagtcatgattctggctgttatcttaaaatgctacatataatacaaataactaaattttctcgagatttgagaacttccactggattttaaccaacggctattctaagtttttgtcatccacggtgattgattaaagttcttctctaaaaccctttacaggccgggcacggtgctggaggccatgcagggcacggtgctgggcatggtgcagggcatggaggctcatgcgtgtaaatatcccagcactttgcaaggctgaggtgggtgaattgcttaaactaagaagtttgaaagcagcctaggcaatatggtaaaatcccatctctacaaaaatacaaaaattagccaggcatgatggtgcatgcctatggtcccagctacttcggagggtgaggtaggaggatggcttgagtttgggagggagagattgcagtgaaccaagatcatgccactgcactccatcctgagtgatagagccagaccgtgtctcaaaaaaaaagcctttacaatcagctatcatctaaattacttttaatggaaaggattctgacaagttctcttaaatatggtttcagataactttggggatcaaaccattggactaggaaaatcttccaggactctaaaaagctgaatgagaatttctaattgaaatcaagcaaaacacaaaaaactgaatgagaattgctatttgaaatcaagcagaacaagatttagttacatgggagtgaacttataaaagaaggaaaagattttatccatggccctcccattagaaacattgttgatcctctttatgttttgttttccaaagtcaataattttttttcttttcagctatttttaatttacaatacattggataaactacattgtgaacaaaaatttgagccatttatctgtctctctagctgatttctccagaattcagaagccattcgtgagcattcttaaattatggcaatataattatttgcataatttcaataagaatctgtttttggtaacaagattcaattggagacactgtttgttttatcaaggctttaactcgaatggcagatacaaccagaccactttaaggaattgaggttgactttatagcaccaatacaaagccccttagaatgactggcttgatgtcctgtatacaaaggtcctttacaaagttgctattcttgtggtaagaaataaagaatgtcactttctgatgggccaggaacctcaagatatttggggaccttgagaagagaagactacacccattcattaaagtattacaggagagctggcaagatgtctgaataggaacagctccggcctgcagcacccagtgagatcaacacagaagtcaggtggttcatgcatttccaactgagcctccactggtgatacccaggaaaacagggtctggagtggacctccagcaaactcgagcaaacctgcagcagagggacctgactgttagaaggaaaactaacaaacagaaaggaatagtatcgacatcaccaacatcaaagaccaaaggtaaataaatccacaaagatggggagaaaccagtgcaaaaatgctgaaaactccaaaagtcagaatgcctcttctcctccagaagatcacaactccccgccagcaagggaacaaaactggacagacagtgagtttgatgaattgacagaagtaggcttcagaaggcgggtaataacaaactcctccgagctaaaggagcatgttctaacccaatgcaaggaagctaagagcctgaaaaataaaggttagatgaattgttaactagaataaccagtttagagaagaatataaatgacctgatggagctgaaaaacccagcacaagaacttcatgaagcatacacaagtatcaatagctgaatcaatcaatcaggagaaaggatatcagagattgaagatcaactcaatgaaataaagccagaagacaagattagagaaaaaagagtgaaaagaaatgaacaaagcctccaagaaatagaggactatgttaaaagtctgaatctacgtttgattggtgtacctgaaagtgacagaaagaatggaaccaagttggaaaaaactcttaaggatattattcaggagaacttccctaacctagcaagacaggccaacattcaaattcaggaaatacagagaacaccactaagatactcctcaagaagagcaaccccaagacacaaaatcatcagattcaccaaggttgaaatgaaggaaaaaatattaagggcagccagagagaaaggttgagttaccaacaaagggaagcccatcagactaacagtggatctcttggcagatagcctacaagccagaagagagtgggggccaatatacgacattcctaaagaaaagaattttcaaaccagaatttcatatccagccaaactaagcttcataattgaaggagaaataaaatcctttacaagcaaatgctgagagatattgtcaccaccaggactgccttacaagagttcctgaaggaagcactaaacacggaaaggaacaactggtaacagccactgcaaaaacataccaaattataaagaccattgacacaatgaaaaaactgcatcaactaatgagcaaaataaccagctagtatcataatgacaggatcaaattcacacataacaatattaaccttaaatgtaaatgagctaaatgtccccagttgaaagacacagtctggcaaattggataaagaatcaagacccatcaatgtgttgtattcaggagacccatctcatacacataggctcaaaataaagggatgaagaaacatttaccaagcaagtggaaagcaacaaaaggcaggggttgcaatcctagtttctgataaaacagatcttaagccaacaaagataaaaagagacaaagaagggcattacataatggtaaagggatcaatgcaacaagaagagctaactatcctagacatatatgcacccaatacaggagcactcagattcataaagcaagttcttaaagacctacaaagagacttaggctcccacacaataatagtgggagactttaacactccactgtcaatattagatagatgagacagaaaattaacaagaatatccaggacttgaactcagctctggaccaagtggacctaaaagatatctacagaactctccaccccaaatcaacagaatgtaccttcttctcagcaccgcattgtacttattctaaaattgaccacataattggaagtaaaacactcctcaggaaatgcaaaagaatggaaatcataacaaacagtctctcagaccacaatgcattcaaattagtatgcaggattaagaaactcactcaaaacctcacaactacatggaaactgggcaacctgctcctgaatgactactgggtaaataacgaaatgaaggcagaaataaagatgttcttcaaaaccaatgagaacaaagacacaacgtaccagaatctctgggacacatttaaagcagtgtgtagagggaaatttatagcactaaatgcccacaagagaaagcaggaaagatctaaaattgacaccttaacatcaaaattaaaagaactagagaagaaagaacaaacaaattcaaaagctaggagatgacaagacataaataagatcagagcagaattgaatgagatagagacatgaaaaacccttcaaaacatcaatgaatccaggagctggttttttgaaaagatcaacaaaacagaccactagccagactaataaagaagaaaagacagaagaatcaaatagatgcaataaaaaatgattaaggggatatcaccactgatcccacagaaatacaaattatcatcagagaatactacaaagactaaaccaggaagaagtcaaattcctgaatagaccaataacaagttctgaaattgaggcattaatcaatagcctaccaaccaaaaaaagtccaggaccagacggattcacagccaaattctaccagaggtacaaagaggagctggtaccattccttctgaaactattccaaacaatagaaaaagagaatcctccctaactcattttatgaggccaacacaacaaaaaaaggaaattttaggccaatatgcctgatgaacatcaatgcagaaatcctgaataaaatactggaaaactgaatccagcagcacatcaaaaagcttgtccaccatgaccaagttggcttcatccctgggatgcaaggctagttcaacatgcaaatcaataaatgtaatccctcacataaacggaatcaatgacaaaaactacatgattatctcaatagatgctgaaaaggcctttgacaaaattcaacagcccttcatgctaaaaattctcaataaactggtattgatggaacatatctcaaaatattaagtgctatttatggcaaacccacagccaataacatactgaatgtgcaaaaactggaagcattccctttgaaaatcagcacaagacaaggatgccctctctcactactcctattccacatagtgttggaagttctggccagggtaatcaggcaagagaaagaaatacagggtgttcaattaggaaaagaagaagtcaaattgtctctgtttgcagatgacatgattatatatttagaaaaccccatcgtctcagcccaaaatctccttaagctgataagcaacttcagcaaagtttcaggatacaaaattaatgtgcaaaaatcacaagctttcttatacaccaataacagacaaacagagagccaaactatgagtgaactcccattctccattgttacaacaagaatgaaatacctaggaatacaacttacaaggatgtgaaggacctcttcaaggagaactataaaccactcctcaaggaaacaagagaggacacaaacaaatggaaaaacattccatgctcatcaataggaagaatcaatatcgtgaaaatggccatactacccaaagtaatttatagattcactgctatccccattaaactctattgactttctccacagaattggaaaaatatattttaaattccatatggaatcaaaaaagagcccgaatagccaagacaatcctaagcaaaaagaacaaagcttcaagcatcatgctacctgacttcaaactatactacaaggctatgataaacaaaagagcatggtactggtaccaaaacagatatatagatcaaaggaacagaaccgaaccctcagaaataacaccacatatctacaaccatctgatctttgacaaacctgagaaaaacaagcactgaggaaaggattccctatttaataaatgatgttgggaaaactggctagccttaggcagaaagctgaaactggatcccttccttacaccttatataaaaattaactcaagatgaattaaagacttaaacctaatacctaaagccgtaaaaaccctagaggaaaacctaggcaataccattcaggacataggcatgggcaaagacttcatgactaaaacaccaaaaacaatggcaacaaaaaccaaaattgacaaatgggacctaattaaactaaagagtttctggacagcaaaagaaactatgagagtgaaagggcaacctacgaaatgggagaaaatttttgcaatctatccatctgacaaagacctaatatccagaatctacaaagaacttaaacaaatttacaagaaagaacaatcccatcaaaaagtgggcaaaggatgtgaacagacacttcttaaaagaggacaattatgcaaccaagaaacatatgaaaaaaagctcatcatcactagtcattagagaaatgcaaatcaaaaccacaatgagatgccatctcatgccagttagaatggcaatcattaaaaagtcaggaaacaaaagatactggagaggatgtggagaaataggattgcttttacactgttggtgggagtgtaaattagttcaaccattgtggaagacagtgtggctattcctcaaggatctagaactagaaatgccatttggcccagcaatcccattactgggtatatacccaaaggattataaatcattctaccataaagacacatgcacacgtatgtttattgcaggactgttcacaataacaaagacttagaaccaacccaaatgcccatcaattatagactggataaagaaaatgtggcacatatacaccatggaatactatgcagccataaaaaaggatgagttcatgtcctttgtagggacatggatgaagctggaaatcttcattctcagcaaactaacacaagaatagaaaacaaaacaccacatgttctcactcataagtgggagttgaacaacgagaacacaagcacacagggaggggaacatcacacactggggcatgttgggggttgggggcggggggagggatagcattaggacaaatacctaatataggtgatgggttgatgggtgcagcaaaccaccacagcacatgtatacctatgtaacaaacctcagcattctgcacgtgtaccccacaacttaaagtataataaaaacgtaggttaaaaaaaagtattacagacacagtatgatgcaaatctttgacttggctagcctcaaggcttttaaaagtctaagattccttagtagaaagttccaacaaagccaattttaagaagcctatatggtcaataaatattcttgctgcactttatgcaaataatcagaccaggtatgataagactaaaacttattttgcacagaaatttgtcctactatggtttgtctttgataaaatgatggactagagagagaaaattcatgtttcaaatgaaaactgtgacatatgctattagattccagccctgatcattcttttccgagtttttattatttgcctataatttgggctgaatcctgaattatttcctggctccaagtgttccctagtgaacccagataaaatatatttttaaaaaacttgttttatcctgtcagtaatgagatgtatttttataggactacttaaactagcaattacaattcgattattatgattatagaatctcgggatttatcttccttcttgtcaaggtctttacctgatgtttgtctcattaaaaaaaaaaagaaatcagactgattgcactctactcaagactgaagacatgtactttaacctgtctctgttaccagtaaaccaaagccttaaatttcagaatccgtcagggaccctgtgtggtccctggatcaagcacacatgggcttatgaatgtgttgaccgctggcatatgagaggtaattgtctattaggttatgtggctcttcctcttcctatttataactccaatgtttctgaacgctgaagtagttcatcgaaattattttccaggattagacaaaccgtacctgcaaaccaaggagatgaattttggcctatgtttggcagaaatctcttgcaatggtggggagtaacctctcatgaacgtataattagaaatctgtcaaccactctaggtaacttagcaaatgaactagctgaagccatagctaccaaataaagatcttcagactctttattcaggatagtcatggatgacggaataactttaggctacatagtggtgaaacagggagaaactcatatggcagctagctaacacttcatgttgtgtttagatccatacatcttctgaagttgaaacacgtgtaaaaaaataagacgatatgggaattaattatgacaaatcctagggaagaggctgaaagagctgtaacacaaacagggctgagacatgccccttgctcgccacattgtgggcaaagagaaggaaagaagagctatggccctttggggagcccagacctgggagctccctgagccagagctgtgattccttctttggggcctttggttcctgatatctccaagcttctgggtgccactgtgttcccagtgtgccagctgtggaagcttcttgaggtgcccgtggtccagccacagccttgtggagagctggcgcccgtgttggcacctggagctacctgctccacttcagcagccagcaaatctgactgcacagtgaccagaccccatgctcactcacacaccccttgccactccatgcagtctcccttggcaggcatgggatccaacgtggtagcatgagcagagcacagcctgccaggctgagtgtgcggggcccagcaaaactcaggcaaaggtgccaccagtcatagaggtttctgtccagaaaagtaacaccccaaagatcccataacaccgctactcttcccagcctctggaaactctcagtctactctctatcttgatgagttcaattgttttaatttttagctcccacaaatgagtgagaacatgcgaagtctgtctttctgtgcctggctcattgtacttaacataattgtcctctagttccatccatgttgttgcaaatgacagaatcttattctttttcatggccgaagagtactccattgtgtatatgtactacattttctttatcccttcatctgttgatgcacacttaggttgcttccaaatcttggctattatgaatagtgctgaaataaatatgggaatgcagatatctctttgatatactaattttccctctcttgggtatatacccagcagtgggattgctggatcatatgatagttctatttttaattttttgagggacctccatattgttctccatagtgaatatattaatttacattcccaccaacagagtaagagtgttcccttttccccaaattcttgaaagcatttgttattgcctgtcttttgcataaaagccattttaatggggtaagatgatatatttttgttgttttgatttcaatttctgtcatgataaatgatattgagcatcttttcatatacctatttgacatttatatatgttcttttttgtttttgctcattttttgagacagggtctcactctgtcacccaggctggagtgcagtggtatgatcatggcttaatgtagtgttgactgccagggttcaagcaatcctcccacctcagcctcctgagtagctgggaccacagtcatgcatcaccatgcccaggtagtttttaaaattatttgctatgttgttcaggttggtcttgaactcctgggctcaagtggcccacccgtcttggctccccaaagttctggaattacatgtgtcagccactgcgcctgacctgtgtgccttcttttgtgaactgtctgttcagatcttttgcctatttaaataattggattgttagtttttttcttgtagagttgtttgagctccttatatattctggttattaatcccttgtcagttatatagtttgcaaatattttcttccattctgtggattgtcttttcactttgtccattgttttctttactgtgcagaaacttttgaacttgatgtgataccacttgttcatttttgctttggttgcctgagcttttggagtattactcaagaaatctgtgccaagaccaatttcctggagagtttccctaatgttttctttcagtagtttcgtgtctttgatttaagtctttaacccatttggatttgatttttgtatatagtgcaagagagggttctagtttaactattctgccaatgactttgggaggccaaggtgggcggatcatgggggcaggagatcgagaccatcctggctaacacggtgaaactccgtcactactaaaagtacaaaaaaaaaattagccaggcgtggtggtgggcacctgtactcccagctacttgggaggctgaggaggagaatggtgtgaacccgggaggtggagcttgcagtgagcccagatcgcgccactgcactccagcctgagcaacagagctagactccatctcaaaaaaaaaaaaaaatctgccaatgaatatctagttttcccagcacaatttgttgaagagactgtcctctcccccatgtatattcttggcaccttcattgaaaatgagttaattgtaaatgtatggatttatttctgggttctctattctgttccattggtctatgtgtctgttttatgccagtaccatggtgttttgtttataattgctctgtactataatttaaagtcaggtgatgtgattcttccagttttgttctttttgctcaggatggcttttggtattctgggtcttttatggtttcatgtaaattttaggattttttttctatttctgtgaagaaagttattagtatttcaatagggattgcattgaatctgtagattgctttgtgaagtatgggtattttaacaatatttactcttccaataaatgaacatggactatctttccattttttttttggtgtcctctttaatttttttgcatctatgttttatagttttcattgtagagatctttcacttcttctgttatgtttattcccagttattttattttatttgtagctattgtaaatgggattacattcttgattttcttctttagattgttcatttttgtcatttagaaatgctactgacttttgtagtttgattttgtatgctgtgactctgaatttgttgatcagttctaatagttttttggtggagtccttaggtttttccaaatataagagctaatcatctgcaaacaagaaacagtaataattttacttctttccaatttggatcccttttattgtttttctcttgtctgaattgctctagctaggacttccagtactatgttgagtaacagtgttggaagtggacattcttgtcttgttccagatcttagaagaaaggctttcagcttttccctgtccaggatgatactggctgtgggtctgttgcatatggttttcattgtgttgtggtatgttccttctatatctagttttttttgagggtttctttttatcacagggatgttgaattttattaaatgcttttcagcatcaattgaaattatcatatggtttttgtccttcattctgttgatatgatgtgtcacattgattgatttgcatacattgaaccatgttggcatccttgggataaatcccacttagacatgatgaatggtctttttcataggatgagtttggaaatactacagccttctctgttttttttgaatagtttgagtaggattgatagtaattctgccttcaatgtttggtaaaattaatcagtgaagccagtgaagccattgaatccaggcttttctttgctaggacatgttttattaaggcttcaatttcatttatccatttcttctaggttttttttttttttgagatggaatcttgctctctcacccagactgcagcgtggtacaatctcagctcactgcaacctctgcctcccaggttcaagtgattttcctgcctcagcctctagagtagctggaagtacaggtgcatgccaccatgcctggctaatttttgtatttttagtagagatggggtttcaccatgttgaccaggctggtcttgaactactgacctcaggtgatcacctgccttggcttcccaaagtgttgggattacaggcatgagccacggtgcccagccatttcttccaggtttttcaatttattggaatatagttggtcataatagtttctaatgattctttgaatttccacagtatcagttatagtgtctcctttttaatctctggttttatgtatttgaatcttctctcttttttcttagtctggttaagtgtttgttgattttgttggtcttttaaaaatattaacttttcatttcattgatattttatatttttaaatttcaatttcatttatttctgctccgatctttgctatgtttccttctactaattttggttttggcttgctcttgcttttctaattatttaagatgcattattaggttgtttatttgaagcttttctactttttttgatgtaggtgcttttatctataaacttacctcttagtactgtagtactgtttttactgtatcccataggttttttttttttttttttttttttttttgttttttttttttttttgagatggagtctcgttctgttgcccaggctggagtgcagtgacgcgatctcggctgactgcaagctccgcctcccaggttcacaccattctcccgcctcagcctcccgagtagctgggactacaggcgcctgccttcacgcccggctaatttttgttttttgtatttttagtagagacggggtttcaccgagtgcgcccggcctgtaccctaggttttggtttgactttaaactttttcttttctcgaaaactcagtgtcatggtaccggcttcttgtgctttgggcagtgagacccttttacttgataacagtggtagctgggacaagttggcaatgtaaataaataaacaacatctagattggaaaggaagaagtacagttatctttatgtacagatgacatgatcttgcatttagaaaatcgtaagaaatttactaaaaagtattaggactcatgaacaaacttaagaatgtaacactatataagattggtatacaaaaataactgtatttctttaccaataaatcaagaatccaaaaatggaattaaaaaaataaatcttgttacaatagaattaaagctggggaagcttaaacttgaacactaaaaactacaatacatggttagcgttggaaacacccagataccatccctgagccttctctccttggctctgagggctttaccttcacggggtgaggaaaggggttgcattcttggcttttacattatattaggtgggttcgggttgaggtatctgcaattcaaatgagtattacaatctctacttttatggataagagactgaggcccaccaagagagggaatgacagtccatatcctggaaggcgaattgtcaggcactgatttccgctatttaacccctgccaatcatcatgtatttaaaggatccccagataccataccaataggtgttcaagagagaggcctgtaatctaggcgtctgagaaaacaaggctagagattccaatattggagacaacagggctctgggaagattaaggttgagttttctggatctgcagaatagagtcactgaggaccaattgcaagatcagaggagatgaaagaacaagtcagggcatgcttaggaaaagagaataccagggataggttttaggcaagagtcacactgaggaagggcaggttcttggcgtcgtttaggaagaaatccaaaagcaagcctgtggtggaagaaagcagctctacggaggcattggcggtgttacagcactgcgtccactccggcagggcagggagccctccgtgggttgtgctcccagagcagcagcctaggggtggcttgtagtcatttttataattcacttttaatggcatgctaattaaggggcgggttattcagaaatagctagaaatgggcagtaacttccatctgtttccatggcaaggggtggggacttctcgtgatgacatggcattggcaaactgtcatggcactggtgggagcgtcttctggtgatctgaggcgtgaggtgctttcgctgcctctcccaggttcctgcgtgcctcttacctgaaagcccatcacacccccatctgcccacctacaaacgtcactgccctttcaccccatccccgtttcacacgcactcccacatcaaccctgagcattcaagcctgcgtttccctgttaggaacctcggtggtagccggagctctgagaaacccctaggcagaactccttgcctagtttgtggcagacatcagggaaggaaaggcaaatttcaggtctttctcacaataaataaataaagataggtagatttgattgatggatggatggatgaaacctgggagtctacgggcaaatatttatcagacactggaagtgtaagttgtcacaaagattatggagtgcacctgtcttatgaccctgttattttatcctagtatgtgcactagagcatattttctaacagtgtaaattgaaggctcacaaattagtttagtgagagaaaagataacggattggaagagaattaccatattcattagttgtgttttaaaatttttaaagtaaaatagagacattatttttttcatgctttcgaatgcatctataaaaaatagacttgagggctgggcgcagtggctcacgcttgtaatcccagcaccttgggaggccgaggagggcggataacgaggtcaggagttggagaccagcctgactaacatggtgaaaacccgtctctactaaaaatacaaaaattaggcgagtgtggtggcacgcgcctgtaatcccaggtacttaggaggctgaggcaggagaatcgcttgaacccgggaagcggaggttgcagtgagccgagatcgcaccattgcactccagcctgggcgacagagtgagactccttctcaaaaaaaaaaaaaaaaaaaaaaaaaaaaaaaaaaaaaaaacttattcatagcatagaccaattggcctctattgaaatttctccattattttcacaatgtcccaggctgtgaaaccaggatttaataaagaaccagaatgccacatctgtgtcacctgggtagggaccagtcctgatacattaactccgggtctctgggtaactggactcaactgctgggcaaaacagaatgtccggcttgggttcctaacggggtaccgcaaagcctcatgggaattgtagtgtcaccttccaatgatgttaccatcaaggaccttgggaaccagcttttctctctgcgcttgcgccgcccggcccactccgccattttcctccggaagtgcggcacccagaggccgtcctgtagccgggccggcttggggcttggttctatgtccctgcgggtcggtgcaagggcgaagaggaacccgtgggcctcaggggatcccggggggccggaccagtgttccctagttgtgggagcagacgcgtgggcacattgcgggcgggcagggcctgaagtgcaggtgcgggcagtggaccctggcgggggctgggaggacaggcgtggggtcccggcagtgaaacgggttctagaggcgcaggagcaggtaggagaggccggtggccctgggcccggagtctgcaggccgcgctcctgtcctgccgctgagggacccggttaccaacctgcatgacgctcagtttgcccatctgtcccagtggtaacacacagttctcgggagacgttccccattcccagaggagtagtgtgaaacgcgtgcgcctctagtcttaaacttggcgtttgtattagttgggtttcctggtgtctctttagcaagtgaagtttctggttccctccttcactgtgtgacctgcctagtcctcctgggtcgcatttacagaagtttatacgagacctagtttccagggaagaactcactgattccgcgagggagatggcttaatggatgatggtcgtcagccttaaggatacttcagtcttaactgtgtgttacaaagtttgaaagggagggttccctatgaataagaagcacacttgaaagaacagccatctggtctaacctctcactggtgcttcagaggaggaaaaaaggtcacaggtgaagatcccagttttccttgctcaggaaatattaattctactccctagaatgcacaagatttgcaaagactaggtgatagtagaaggtttggacgaactttcagaaggttgaggtgaattcagctaagaagaacaggcaaggacttaggaaatattccttatttgaaggggcctgaaagtgtggtctggggtacagcagtgacctgtcatacttgagaggattaaaatactctccaaacacagtcccattccttcaaccttagctcgttttttccagcgtctgagatacattaaacctagtccatccccaaatttaacattagattgcgaagttctattgattgtatttgatttgtaatttaacattttctccccctacgtaattttgttaaaaacacagaagtgaattctgttcacttaggtgtaacagttaatacttgctgtttaaggaactaattaaaccttactggcttataaaaaacaaccaccattttatttgttcgaagttctgtggatctgcactttggtgtggtgggttcagctgggtagttaatatatttgtgttgcctggatcacaaaaaggcctcagtcacctggtgccttgactgagcctggttggtttaagatagtttacttcacaatctggtggtttgtggtgactcttggctaggccctgtgtctccaacagggtagctccagacttcttcacaatttcccccaaaaaggaaagaaccaatggatatttgcatcacattttccattttccattcactggacaagtcagatggaaaagcccaatttattgtcagagcataatatgagggcttggatagaaggaaaggtgttattgggaaacatgagtagaatggtgtactgcaggaaatacatattatgtacattttaaaaaacgtaattgtaggccaaaattgctggtttgcaagatgcactttccatgatgttcaggtatagaaaagcaagatgtactgtcataggaacactcatatgaagttatttgtggaatctacatattaataggaaaatagttaatacagcccagtatatttctataacatttattttagtgaacttataatgtttctttgtattaaattattagattatatctttagataatattgttactaaattagtaggtaatatatatttttattcaaaaataaattgtgcatctaatgtctaccaattaatgtacttgtagatgtatcttatcttaacttgagtctttgctgcccctaatgaggtgtgaaggactcttctcccctggggaagtttttctttttcaggagggaggagggctttcccaggtaatgtgtctagagtgttgggcagaagaatctgggaccacaccacaccagttctctccttaatccacgtcatttgccttctatcccagctatgtttccagtgtcctctgggtgtttccaagagcaacaagaaatgaataaatctctggtgagttgtttatttgttcttcactttgttttacactgtattttctgagtttatgggtgtctgtgaattaaaaaggaaaagtagaaataagtaaaactcaggttgaaggaaatatacataaataagataaagctgacctgtagatataggcaggttataagagcttagagttgtctaagttgagtgcaaattttcctctgatctttctgatgccgagacaaaaaaggcagtcatgtttgttatgtgattggaatggaacccgagaagagagcatgctgtgttcttgtgggacaggaaagcttgcgtgcaccaagtctgaaccaccaccttcattggtgacatagattatgtgctggaacatatttcacaccggcctggcagtaaacacttgtagtgttgtgcagtggaaacggtcatcttccgctaaagcacggcgtgttgtgcagcggaaatggtcatctgctgctaaagcacagcttccatcgtaatgtatgctccttgctcaaagagtgtggtcccaaacagcctttgggaggtcctccttgattcatggatgaaacctggaacatcttgaggactgagttaaccataggtccttaaataactctccacacgtttttcttagtttatctctacatgcagggtgtgcagcagcctgttcaaagtcatattttctgggaaatatttccagtgtttatttgcactttagcccactctgtgtagccttatttcttctaaactcaccattaacctgaataatagtcaaatttagggggactgtatttgccttacttgagtcttctaccatagttgaaactgtcgtacccgagtgagttagagagaaatgccacgcattgagacgaattcaggagtcctttactagccagcgactgagacatggctaacgcacgaaattctctcggccctgaagaagggactagattttcttttatactttggtttagagaggggaggggggattctagctgcaacaactttacagaagaaaaaaacagacaaaaaacttagaaaaacagatggttacaggaaaacaaactgttcctggtgtagggtctttaaattcaccacaaagtgataggtgagggggctctgggcattatctgccggacaaatgtgggggctttatgatactatctctgagtaaattgctgggaactggggacatctcttgtctcagcactttatcagttatttgcacgctttgatatgttgaaaatcagcttgcacaagttaaagtccttgaggaaagggggtgggtaaggagtccttgatgtcttgttaatgaaggagccaaatggagtttgtctggttttctcagctaagggagagtctattcatattaaaaacaaggttagctgtctaaggaagagtctattcatgttaatacaacgttgggtattacaaaacgtctgttcatgatctggaaattcttctgtgttagttctgttaaaagaaaaactttaaaggagtttaatttagcaataaacgattcatgaatcggacagtccccagaatcacagcagattcacagagactccagtgcagtcatgtggtggaagaagatttatagacaaaagggaagtggcataccgaaatcggaagtgaggtacagaaacaactcagcgtttgccttgtttgaacacattttgaacatttggcagtgcctgagtggttgaagtttggccattgggattggccaagatgtagctgttgttccaggtgcatactcttaagttagtttttcattcttgtatacctattaaggtaggttgcagttcacccacaaggactcatatatagaattatggagtccttctcaggccatacttagttcactttaacaatgccttccctttggttattttctcaattttgagagattggccgaaacttcagtcactggtgtcactattaccattgcaaatgtacttacttggtttagaaacccactgggaaatagaccagtgagatttgaaaaggtggaacaaggacttgagtagaaggtatcttcttatgctggaacatcctgtttacaggagaaaaacaaaacctggtttgttctaggatttatgtgtttccctaaagtcttagtttgattatgttacatttagcatgagtgactccattttggtttggtttggtttggtctgttgggacctattgcatgagcttagttcaaaacaatggcctcccataattttgctttaaaaattcctcctttttgctgggtgtggtggctcacacctgtaatcccagcactttgggagcctgaggtgggcagatcacgaggtcaggagattgagaccatccttgctaatatggtgaaaccccatctctactaaaaatacaaaaaattagccaagtgtggtggcgggtgcctgtattcccagctactcaggaggctgaggcaggagaatggcctgaacccgggaggcagagcttgcagtgagccaagatcatgccactgcactccactctgggggacagaccaaaactctgtcttagaaaaaaaaaatcctccttttcagtcaagttctcacttagttgagagtgtgaccaaaatgtagggccttagcatcactcttagttaccattgttttgggttccagttttagcatgtcattcccattgttttgggtttctggtttagcacatcactcccattgttttgggttccggttttagcacgtcattcccattgttttgggtttctggtttagcacgtcactctcattgttttgggttcctgttttagcacgtcactcccattgttttgggttctggtttagcacgtcactcacattgttttgggttctggttttagcacctcactcccattgttttgggtttccaggttttagcacgtcactcccattgttttgggtttctggtttagcacgtcactcccattgttttgggtgtctggttttatcacgtcactcccatcgttttgggtttctggtgtagcaggacactcccattgttttgggtttctggttttagcacttcactcccattgttttgggtttctggtttagcaggaccctcccattgttttgggtttctggttttagcatgtcactcccattgttttgggttccggttttagcacgtcactcccattgttttgggttccggtttagcacgtcattcccattgttttgggttcaggttttagcacatcactcccattgttttgggtatctggttttagcatgtcactcccattgttttgtgtatctggttttagcacctcactcccattgttttgggtttccaggttttagcacgtcactcccattgttttgggtttctggtttatcatgtcactctcattgttttgggtttctggtttagcaggacgctcccattgttttgggtttctggttttacacgtcactcccattgttttgggtttctggtttagcaggacactcccattgttttgggtttctgctttagcgggtcactaccattgttttgggttccggtttaagcacatcactcccattgttttgggttccggttttagcacatcactcccattgttttggatttctggtttagcaggtcactcccattgtttttggttctggtttaagcacatcactcccgttgtttagggttctggttttagcacctcactcccattgtttgggtttctggttttgcaggtcactcccattgttttgggttccagtttaagcacatcactcccattgttttcgtttccggttttagcacgtcactcccattgttttgggttccagttttagcaagtcactcccattgttttgggtttctggtttagcatgtcactcccattgttttgggtttccagtttagcatgtcactcataggttatggtggccttatggttgcacattttttttaatctcttgtcattccagttgaagagataccatttgacattttagagatggctgcatgcaaactcttgaaacatttgagtaagtacagtacaccagggagactcttatgactattgggataacaccaagatgtggtatatgctccttactcagggtccccataaatcaaaccaccaaaaatcaaatagattaaagaatgaattagataaagggtttacttgcttaactaagtggtttttttttgttaattccctacaaccaaatctttataataccccatgttttctccacatgctgtaagtgttagcagctgcacagatacttaagataagagtctcatgatagtagagaagtcttgatctgtgatcttgggaaaagctgttcacattaaggatgccatcttcttctggggggaactgtccgtgttagctttaccttaagggttccaataggcatatggttctgagtgtggagggacccttctgagttgtgagactatgaacccaaagtttaaggttttaaagttttgttgtcatgtggatggcgagggcagtccttctctgatgttctcagaagatccagtcatcagattctagattttgaagggtttgactgtcctcagtgaaccataaaaggctttctttacctggtgaaaatacacttcagggtaataatctactgttttaacatcaactctctcgcatggaagagcttttatacaatcagaaaacatgcactgaaaatgacaactgaatgaaatccctttataaaatgtttaaatggcccatcagataaccaaatgtacctaaagttttgattgttttcctaggaatataggtttcacaaaccaaacattggttataaactattttagcagtttagaaatcaccacaccaatatatttaatttggatcgttttctctttctgtgatgagttatggaatgcagaacttttaataacaaaagtttttaggacttaagaaggataaggtggccatcctggttctttataggtctgtgcttaattaacatcagacttacatcctcttgaataccagctgtttctccaaattaggtgcatggcactggtaactgatgagtagttataggtaatttgatttagaccatggagtttatttaaattatatatctaaacaatttcaatattggtgatttagcatgaaaatgtggcataatatttccttggtatacaatttttgttttacttgggttagcagttttacaaaccagttggtctttttattaaatttttgatatttttttttttgagacagagtctcactctgttacctaggttggagtgcagtggcacaatcttggctcactgcaacctctgcctcctgggctcaagcaattctcttgccacagcctcccgagtagctgggattacaggcacataccaccacacccagctaatttttgtatttttagtagaggtggggtttcacctttggccaggctggtctcaaactcctgacctcaagtgatccaccggccttggcctcctaaagtgctgggattgccgacatgagccgctgcacccagcctaactgttgagaattcttagccagtccaattcttggggtatcggggaacttatggggaatttttacccatgatattaaagttattagaaatctgtgttcacgagtgtttttcagggtcattttcattctttcatgaatcttctaagagacaccatactctagaattttgcatgcttgtgaagtttttagaaactgcatcactattaagcaattaactgtgaaatgactttagttatagttaaagacaattgacaaggaaatttggttatttctgtggtctacaataacttaataaccataattagggtggatgtggtggctcatgcctgtaatcccagcactttgggaggccgaggtggaaggatcatgaggtcaggagatcgtgaccatcctggctaacacggtgaaatccatctttactaaaaatacaaaaattagcctggcatggtggtgggtgcctgtagtcccagctactcgggaggctgaggcaggagaatggcatgaacccgggaggcggaagttgcagtgagccgagattgcgccactgtactccagcctgggtgacagagcaagactccatctcagaaaaaaaaaaaatacaagaattttagaaatcctacacaattttagaatggattgatgacacacactaaatataacctgaggaaggttccacattattttttattttgacagtgctacccatgtgacttaacatgttaaatagtcctgtttacctctcttttgggtgcttcaggggtctctgtagtatcccaaaattagaggtcagaaaagacaattttgaagttgaaatttgattttgggaagcctattaaatatattaaaggtttaaacacttgatgttatgaaatagaattccacgtcaccgtaagtcattcatttaccaaaaatcatgacaaaaaatttttattatttttttatttttattttttattatacttttagttttagggtacatgtgcacattgtgcaggttagttacatatgtatacatctgccatgctggtgtgctgcacccactaactcgtcatctagcattaggtatatctcccaatgctatccctcccccctccccccacaccacaacagtccccagagtgtgatattccccttcctgtgtccatgtgatctcattgttcaattcccacctatgagtgagaatatgcagtgtttggctttacgttcttgcaatagtttactgagaatgatgatttccaatttcatccatgtccctacaaaggacatgaactcatcattttttatggctgcatagtattccatggtgtatatgtgccacattttcttaatccagtctatcattgttggacatttgggttggttccaagtctttgctattgtgaataatgccgcaataaacctacgtgtgcatgtgtctttatagcagcatgatttatagtccattgggtatatacccagtaatgggatggctgggtcaaatggcatttccagttctagatccctgaggaatcgccacactgacttccacaatgattgaactagtttacagtcccaccaacagtgtaaaagtgttcctatttctccacgtcctctccagcacctgttgttttctgactttttaatgattgccattctaactggtgtgagatggtatctcattgtggttttcatttgcatttctctgatggccagtgatgatgagcattttttcatgtgttttttggctgcataaatgtcttcttttgagaagtgtctgttcatgtccttcgcccactttttgatgggattgtttgtttttttcttgtaaatttgtttgagttcattgtagattctggatattagccctttgtcagatgagtaggttgcgaaaattttctgccgttttgtaggttgcctgttcactctgatggtggtttcttttgctgtgcagaagttctttagtttaataagatcccatttgtcaattttggcatttgttgccattgcttttggtgttttagacatgaagtccttgcccatgcctatgtcctgaatggtaatgcctaggttttcttctagggtttttatggttttaggtctaacgtttaagtctttaatccatcttgaattgatttttgtataaggtgtaaggaagggatccagtttcagctttttacatatggctagccagttttcccagcaccatttattaaatagggaatcctttccccatttcttgtttttctcaggtttgtcaaagatcagatagttgtagatatgtggcattatttctgagggctctgttctgttccattgatctatatctctgttttggtaccagtaccatgctgttttggttactgtagccttgtagtataatttgaaatcaggtagtgtgatgcctccagctttgttcttttggcttaggattgacttggcgatgtgggctcttttttggttccatatgaactttaaagtagttttttccaattctgtgaagaaagtcattggtagcttgatggggatggcattgaatctgtaaattaccttgggcagtatggccattttcaagatattgattcttcctacccatgggcatggaatgttcttccatttgtttttatccttttttatttccttgagcagtggtttgtagttctccttgaagaggtccttcacatcccttgtaagttggattcctaggtattttattctctttgaagcaattgtgaatgggagttcactcatgatttggctctctgtttgtctgttgttggtgtataagaatgcttgtgatttttgtacattgattttgtatcctgagactttgctgaagttgcttatcagcttaaggagattttgggctgagacaatgaggttttctagatatacaatcatgtcgtctgcaaacagggacaatttgacttcctcttttcctaattgaataccctttatttccttctcctgcctaattgccctggccagaacttccaacactatgttgaataggagtggtgagagaggccatccctgtcttgtgccagttttcaaagggaatgcttccagtttttgtccattcagaatgatattggctgtgggtttgtcatagatagctcttattattttgaaatgcgtcccatcaatacctaatttattgagagtttttagcatgaagcattgttgaattttgtcaaaggccttttctgaatctattgagataatcatgtggtttttgtttttggctctgtttatatgctggattacatttattgatttgtgtatattgaaccagccttacatcccagggatgaagcccacttgatcaagttgcataagctttttgatgtgttaatggattcggtttgccagtattttattgaggatttttgcatcaatgttcatcaaggatattggtctaaaattctcttttttggttgtgtctctgcctggctttggtgtcagaatgatgctggcctcattaaatgagttagggaggattccctctttttctgttgattggaatagtttcagaaggaatggtaccagttcctccttgtacctctggtagaattcggctgtgaatccatctggtcctggactctttttggttggtaagctattgattattgccacaattttggctcctgttattggtctattcagagattcaacttcctggtttagtcttcggagagtgtatgtgtcgaggaatttatccatttcttctagattttctagtttatttgcgtagaggtgtttgtattattctctgatggtagttagtattttgctgggattggtggtgatatccgcattatcattttttattgcgtctatttgattcttctctctttttttctttattagtcttgctagaggtctatcaattttgctgatcctttcaaaaaaccagctcctggattcattaattttttgaagggattttgtgtctctatttccttcagttctgctctgattttagttatttcttgccttctgctagcttttgaatgtgtttgctcttgcttttctagttctttcaattgtgatgttagggtgtcaattttggatctttcctgttttcccttgtgggcatttagtgctataaatttccctctacacagtgctttgaatgcgtcccagagattctggtatgttgtgtctttgttctcattggtttcaaagaatatctttatttctgccttcatttccttatgtacccagtagtcattcaggagcaggttgttcagtttccatgtagttgagcagttttgagtgagattcttaatcttgagttctagtttgattgcactgtcatctgagagatagtttcttataatttctgttcttttacatttgctgaggagaactttacttccaagtatgtggtcaattttggaataggtgtggtgtggtgctgaaaacatgtatattctgttgatttggggtggaaagttctggagatgtctgttaggtccgcttggtgtagagctgagttcaattcctgggtatgctttttgacttcctgtcttgttgatctgtctaatgttgacagtggggtgttaaagtctcccattattaatgtgtgggagtctaagtctctttgtaggtcactcaggacttgctttatgaatctgcatgctcctgtattgggtgcatatatatttaggatagttagctcttcttgttgaattgatccctttaccattatgtaatggccttctttgtctcttttgatctttcttggtttaaagtctgttttatcagagactaggattacaacccctgcctttttttgttttccatttgcttggtagatcttcctccatccttttattttgaacctatgtgtgtctctgcacgtgagatgagtttcctgaatacagcacactgatggttcttgactctttatccaatttgccagtctgtgtcttttaattggagcatttagtccatttacatttaaagttaatattgttatgtgtgaatttgatcctgtcattatgatgttagctggttattttgctcgttagttaatgcagtttcttcctagtctcgacggtgtttacattttggcatgattttgcagcggctggtaccagttgatcctttccatgtttagtgcttccttcaggagctcttgtaaggcaggcctggtcgtgacaaaatctctcagcatttgcttgtctgtaaagtattttatttctcctttgcttatgaagcttagcttggctggatatgaaattctgggttgaaaattcttttctttaagaatgttgaatattggcccccactctcttctggcttgtagggtttctgctgagagatccgctgttagtctgatgggcttccctttgagggtagcccgacctttctctctggctgcccttaacattttttccttcatttcaactttggtgaatctgacaattatgtgtcttggagttgctcttctcgaggagtatctttgtggcgttctctgtattttctgaatctgaatgttggcctgccttgctagattggggaagttctcctggataatgtcctgcagtgttttccaacttggttccattctccctatcactttcaggtacaccaatcagatgtagatttggtcttttcacatagtcccatatttcttggaggctttgctcatttctttttattcttttttctctaaacttcccttctcatttcatttcattcatttcatcttccatcgctgataccctttcttccagttgatcgcatcggctcctgaggcttctgcattcttcacgtagttctcgagccttcgttttcagctccatcagctcctttaagaaattctctctattggttattctagttatacattcttctaaatttttttcaaagttttcaactttgcctttggtttgaatgtcctgccatagctcagagtaatttgatcatctgaagccttctctcagctcgtcaaaatcattctccatccagctttgttccgttgctggtgaggaactgcattcctttggaggaggagaggcgctctgctttttagagtttccagtttttctgttctgttttttccccatctttgtggttttatctacttttggtctttgatgatggtgatgtacacatgggttcttggtgtggatgtcctttctgttttttagttttccttctaacagacagtaccctcagtttcaggtctgttggagttttctagaggcccattcccgaccctgtttgcctgggtatcagcagtggtgtctgcaaaaccgtggattttcatgatccgtgaatgctgctgtctgatcgttcctctggaagttttgtctcagaggagtacctggtcgtgtgaggtgtcagtctgcccctgctagggggcgcctcccagttaggctgctcgggggtcaggggtcagggacccacttgaggaggcagtctgcccattctcagatctccagctgtgtgctgggagaaccactgctctcctcaaagctgtcagacagggacatttaagtctgcagaggttactgctgtctttttgtttgtctgtgtcctgcccccagaggtggagcctgcagaggcaggcaggcctccttgagctgtggtgggctccacccagttcgagcttccaggctgctttgtttacctaagagagcctgggcaatggccggtgcccctcccccagcctcgctgctgccttgcagtttgatctcagactgctgtgttagcaatcatcgagactccatgggcataggaccttctgagccaggtgcgggatataatctcgtggtgtgccatttcctaagcccatcagaaaagctcagtattagggtggcagtggcccgattttccaggtgccatctgtcacccctttccttgaccaggaaagggaactaacttcctgaccccttgcacttcccgagtgaggcaatgccttgccctgctttggctagtgcacagtgcacttcacccactgtcctgcacccactgtctggcactccctagtgagatgaacccagtacctcaaatggaaatgcagaaatcacccatcttctgcatcgctcatgctgggagctgtagaccggagctgttcctattcggccatcttggctcctcctcccattattttttaatattttctgaaaatcttctttaaagagagaaagccaaatgtcacccactttttcataaaaccttacaggcaaatctattattcttttcttttttgagatggattttccctcttgttgcccaagctggagtgcaatggtgcgatctcggtttactgcaaccccctgcctcccaggttcaagtgattctccggccccagcctcctgagtagctgggattagaggcatgccccaccatgcccagctaattttgtgtttttagtagagacggggtttttccttgttggtcaggctggccttgaactcctgacctcatgtgatccacctgcctcggcctccccaagtgttgagattacagctgtgagccactgccccgggccatttttttttaaagatagcgtcttgctctgtcaccctcctcaccacattatagctctgggggccaagctgcatcacaatggaaatcatggagccacaggaagaatccacttagctttgcaagatgctgcccaaggggttgcttggagtaaccaaattaacatttttcattctgctcagagcaaaatatatgtgacaaaacatagccacgagccactttgcttagcacccagtgtcaaactggtaagactcaaacttcctcccagataggccatgccatctctaaatctttttagaagcttctgcatgttaataggcatccctagatgagactaatttgggagccatcatttttaaatgcacttcagggcattattcatttggaatgttacactataagttatctttagtaagattttgccatttctgtaagactttgctgcttcccaggcctaatgaattagccagaaagaacttagttttccagaaattaaggatcctatttttacctaatatattggctttactctcaggttcccttgattgacttagccaatgattttttttcctacctaagcgtgtgaggaaaatgaaacaaaggggcagaacacaaaaatccccgtgaatttccaaaagccaaattttacaaccctccaatattatcatttactaccactttccttctgacccattcagatgtaggaggcctctaactggaactggattcaagccagttaattactggatcaaatctgatcctggacccggtcccgtttctgtcataacttctaaaacatccagccagtcatggctggatagcagtttggaacagaaatttgctcagagaaactcagctcaaaacacaaattcatggagctctgaaatccgagagagaatttaccacgatccccagatgctctgagaggtcaaagggcacaagtgttacagaatcctgaggcgtcacttttctgcctgaaacctctggctggtggcgcctttacctgtgttttgctcgggcccactgggttcgttctgtccacttggctcatgctagtggtctggatcccacacctgccaagggtgagctgggtacagagcagtgaagggtgtgtgagcaagcgagcatgggatctggccactgcacacagccaagcatgccagctgcagtggggtgggcagctccaggcaccgccacaggtgccagctccctgtgaggctgcagctggaccaggctgactgcaaacagcttccactgtgggtatcagggaatgcagcggtgcctggaagcttcgagatgcaggaactgcagagccccaaataaggtgtcacagccctggcttggggagctcctaggtctgggctccctgaagggccacagctcttctctccttctctcttctcttcttcttgcctgcaatttggcaagcaaggggtgcgtttcagccctgtttatgttacacctctttcagccctgctagttggcaggtcccgagttcttgtcctgagtccaggaagaatgaggtatgtgggcaagtagaaggtgagcaaggtgaagaggtgctttattgagcaacagtacagctcagaggagacgtgcagtgggtagctcctttcggcaggcaggtcatcccaatgtctgttcagctctcagcagctgagagagatgcatggtggttagctatgcccacagtgcccaggcttttcgagctgaggagtgccttcaagccagtgctgagccactcttagccccacctcaacgtccctcctgtgctcatcagttcccaaagtgtggagggggccgaggtggcagggggctggcatgtcagcactgccctgagcttgcacaaactgggctgggttgcgactgtgcctgggttcaacctcaatttggatccgaagttggagtgggctctgggagcggagacatgccaggtggtgggagcaggtatgactgggcctacgggggcaggggggcttgctgggcctctgagagtgcaaagatgcccgggtttgctgtcatgggtggatggctgcagctgtgcctgggagggtggggctcctgcctgccaatttagaaggggtgggtctctcacctgttcctggctcccactaactttgaggagttcacagccccagccactcctccccactgcagccagtgtctccgtagcaactgctccacatgggccactgctgccatcatagagcggtccttgcaggtgcctttcttgtacctcagcactcctgggggtcattagaagccctagcaacactgctcaccacactatagctccagaggccctagcagtcctgctcccacagatcccacttctgacaccatctattaaaagaaaatcttcagctgaattaaatttaaaggaacttaattgagcaatgaatgattcacgaatcaggcagcccccagaatcacagcagattcagtgagactccagcacagctacatggtggaagatttatagacaataaagggaacgtgatgtacagaaatctgaagtgaggagtgaggtccagaagcaactgggtccgttacagttctcagcagtgaggtccagaaacaactggactggttacagtgctcagcatttgccttatttgaacacagctgaacactcagtagtgtgtgagtggcagaagtttggctgttgggattggccaggactcagctatagttacaggtgcatactccaaagttaggttatcagtctttctacctattaagttaggttgcagtttgtccacagggactcaaatctagaagtacagagtccttcccaggccatatttagttcactgtaacagttcctattatgacctcactgacagttctttttctctgaattttcctttcttctcaacagcttgtccaaatgttccattggtccctgttcatcccgccctgcagctctccttgactgattctgccctttgtggtttgcagtcctgtttctctacagcttggaccccttcaatctttccatcataggtttaactctctgttgaattcttatttgtagctacgcaaatgttaccttaagctaaaaaaattcaaagtgaaagccacatcctcctctcttcccttatgtgtatggtattactaccatgcagccagtgacccaaaatgggattttttctgggcttttcttgcttagattcaggctcatctggtgtcaagccttgttacttttgtttccttgttcttttatttttaattttttttcttttgagacagagtttcactcttgttgcccaggctagagtgcagtggtgtgatcccggctcactgcagcctccacctcccgggttcaagcaattctcctgcctcagctcctgagtagctggtattacaggcatttgccaccacgcctggctaattttgtatttttagtagagatggggtttctctgttttgatcagggtggtctcgagctcccgacctcaggtgatctgcccacctcggcctcccaaagtgctgggattacaggcctgagccaccgtgcctggcctgcttgttgttttcatctcatcctgatttctgaatacaggagaggagctgagttggtgttcactaacaagcacagaagctttgttacatttacagtgtcattcttggcaaaacctgaatggtatgtttgtggggtgatgaggttcagtcccctgtgacctgtgcatctggccaacactgtggtgacatccttaggaatccatggggagagacaaagcattcaggagttagtgggtcacgtttgacaagggccaataaagaaatatgcaaagacaaaaaacaagaagaacattatcatattttataccttttgtttatataaatttatgtcaatgattctagcttatgttaatatacaatgtatacaatatgctaacatatacaatatatgtttatagtttaaacatttctgtcatgttttcagattctttaaagattacattacacttcctatttcagatagctgtttaaaatgagtaaggaaaaacggatgtgtgcatcagttctaactgtttatggactaaaactagttgatttcttggttaagaacaaaaagtgacaacctaattaactgaaaattttaagtaggcaattatggttttagctttaatgtaaaatattaactatgctccattcttgcatttttaacctaatactcaatataaatcgccacatgccatgtttcagatcaaggttctacttgtgatctctcatgagtttttcaaggttttaattatctgagatgtaacaatgtacccataaccttactggcttaaaccaggaatttattctttttacatgtcacaattttctgggtcaagacactggacagagcggtgtgggttggttgcttcatgatgtccctggtctcatctggaaggactctagtggctggagatgtgaagcaggcacccagaaggactctagtggctggggacatggagcaggcacccagccctctctttgtggccagcacggacttccttccagtctggtagcatcaggtagtcaggtttgtctggcttctcccagggtgtgtgtccaagaggcccaggcagaagctgtaaggtctctcatgatcatccctcagaagtcccagagcatctctcctgccacactgtccagttgtactcatcactgagaccagccatgattcaagggggaaaggtgattagattccacctcttgatgagaagcatagtaggaacctgcagcagtctttaataaaccacagcttgtcctctggccacaaactattaacgtttctcccacatgcaaattatgctttgcccctctcaagagccccagaatggttttccttatggcactggctagtagcccaactgaatcctgaatcaggttgtggtggcttgtcatctgcacccacacacactcagctgcagtgaggactgaatcaggttgtggtggcctgtcatctgaccccccacacacagccacagtggggactgaatcaggttgttgtgagctatcatctgagcccacaaacttagccgcagtgaggggactgctgtgaaaacagtcgacatttccctttagaagctttggtgggaggcaagagggaagtgctgccctgcaggccccgtctaacagttggtcattcccatggggcgcctgttacagttctgtgattagtgcccagtcctggtccctgaaaacggcgcccagtcctggtccctgagaatggtgtttgtgtccttttactcctccctctgggcttttgtcattctccatgttctttttccttcagtgcctgggttgccgttgaccagctttccctgcctttttcttatggtcaatagggtattcaatggcttctttttcattttttttccttttcttttcttttctttttttttactttggccttttgagacaagaaattatttctttatattttctctaaattctgtttgaaaactgaaccttcttctttagatcatgtccctctcctgtcatatttattcagtgacagttaggggaggctggtagcactttccatgttcttcccagatgtctccttaggcagatccctgagatggtgcagtgccctttcagtttccatgttgtggccatagttttcccacagtccctcagcaagtaactctcagaccttttctccagtttccaatgacattttctcaccgtccttcaggccctgaccaagagtcttgatgcccttccaggttgcatgaatggtctccttgaggcccagttacaggtcagcctcacagtcgtgtcacatattgtagcttctgattaccacagcagctcatttccagctgccatattctgttccagttatctattctgaagtaaaacaactcattattacttgttttttggcttagagagtcttggtggccagctcatctcacacacagttgcagccaagctggattgtgtgaaagcacagtggggtggtgtgcagggtggctcactagtggttgggagtggatgttgctggaggctcactagttgttgggagtcggtgttgctggaggctcagtgggggatgtcaatgcgtgtagctagtcatggactggccttgtggtttccatcatgaggtctcaggggagtgggatttcctgcctggtgactggctttctcctgggtaagtgttctgttttctcagcctggcttctgaagtccccaaataccagctttgtcaccttctgttggccaaataagtcagtagtctggtcaaggtttaaggggaattggttctcacagagagaggagcaggaaagaatttgtcacctttagtctaccagaaatgagatttttataacaagtttattccaaatacattccagttccccttgtgaatacttttttgactcacagggtatttcaaagtttattacttggttttcagacatttgaggcttttctggatatcaatttgttgttggtttctaatttaatttcaagtgttcagacaacatcctttgtatactatttcaggcttgaaccttttctcaatccatcgacatacagtctatcttggcactgccaagtaccatttgggtcaggattttgtcatttagatccgtatttttcctatatttttatctggttgttccgtcagttactgagagagcagtattaattcaccagctataattttggattgtcaatttcctgcttttgttctgttgtttttgattcacatactttgaggttctgtgtgtgtgtgtgtagtttgtgtgcactttgaggcacaatttataattgtaacatcatcctctctgattcttttatttttattaaattaccctgtttatttctggtgatatattttgttctgaagcctctttcatctagtgttaacatctctgttgaagctttttatgattagtgtctggatagcatatttttatgtttagcatctgcatagcatattttttctcatactttgtgtctttgtgtttaaattgtgtctctgtggatgccatattgttgggtcttgccttcctctcaggtctggcagtctctgtcttaagtagagtatttgtccacttacattgtaactaatcattgctaaggttggatttaggtctgccatttttctacttattttctatttgtttgtttattttttttaagacagggtcttgttctgtcacccagtctgtagtgcaatggtgcaatcttggctcactgcaacctctgcctcccaggcccaaccaatcctcacttgagccccctgagtagctgggactacaagtgcatggcaccacacctggctaatttttatatttttgtagagatagggttttgccatgttgcacaggctggtcttgaactactgagctcaagcaatctacccaccttggcctcccaaagtgttcagattacaggcatgagccaccatgcctggccttcgtctgtcttttgatcttctatatattctttcctaacttcttttgggttaaatatttctaaatattccagtttgattaatcttttggcttttggaaataattttttataggctgggcatgttggcttatgctcataatctcagctctgtgtgagtccaagggaggtggattgcttgaacccaggagtttgagaccagcctgggcaacatggcaaaaccctctctacaaaaaaccaaaccaaaatttagcctgacatcttggtgtgcacctgtagtcctaactatttgggaggctgaggtgggagggttgcttgagcctgggaggttgaggctgcaatgagctgtgatcatgccattccactcctgccagggcaacagagtaagaccgtgtgtcaaaaaagatcattttttataaataatttataatttcgaattttggtaacaaacacataccttaaaatttaccatcataaccagttgtaagtatacagttttgtagagttaagaatatttacattgttgtgtagcagatttctagatttttttttatcttagaaaactctatacccattcaacaactattaatttccccttccttccacctcctggcaagtactattctactttgtgtttctaaaaatttggcttatatacctagggttatataatatttgttttttaagtaggttccatgttatgtgcagatgtgtcaggattttcttcctttctatggctgaataatatttcttcatatatatatattttctctatatatatatatatgtatattcttttgtttatccatctattcctggatggacgttttggtttcttccacctcgtggctatgtaatgctcctgtgaacacaggtgtacacatatctgtttgaggtcctgctactagttattctgtctctgtagaagttggatggctggatcatatggtcattttattttatttttttgaggagccagttaatatttccaccaacagtgttcaagtgtttcagtttcacctgcacttgttactttctgttgggtttgaagtgatgtcccattgtggtttctatttgcatttctctaatgattagtgatgttacacatcttctcatatatctcatgtatctgttggctatttgtatatcatctttgcatctttggatgaatgttctttgtccattttttaatcactttattttgttgtgttgtagctgggttttttggtcatgagcattcatttatctcacagttcattcttgttacttgggccagggtcatgatcattcattatctctcagttcatcctcattacgttgggcaaacagtcatgctgcagggtatagattatgttattctgttactttcaggtagaattcgggtctaggttctaattgtttctaagtttagattctgaatgagaatcagcagaggtagaccactgctgctgaggcctggggattgctgggaaaaaggcaggaaacagatattgacctgaccatggagggtttatgtttcacggctcccatctgggtacccaaggaacctacatgtagctcgtgtgtggagagcctacattgcccactcaaagcaattgaggatggaacagtcttggggctggagctcattatttggaatgataaccacatctgcacagagaggacctgataagatgttgtccttccatgtatatctgggaatcctgtgtagggtctctctgtaaggacaggggcagtgttggctccttggcctctagttagcttcacaagtagtctagtaaaggctttgccaacttgtcaccatctgtggatattctggtcagctcttgttttcaccctactgacttcttcagacactaggcttttgctttagaccattcatggttttcttcctcttcaaatcagtaatcaataaatcgccttcaagtcaataaatttccactcctttaggaaaccctgatcttctggtcacaccaaggtttaattaactggtttgattgtttttctgttttcttggattttttttccttcttcctgggggtttctagtaattctagtttgatgtctcactttctccattttttatttcttagttttcttctgtgattattttcactgcagctgcagggcctaatcctgggttggcagagaactagcacttactctgccctaattggaatccaggagagatagcaggttccctagtgtgaaaatgtgtttgctcctctctgcttctggtagtctctctgtaggagttctttacgcattctgaatgttcacttcttatgagatacatgatgtgcaactataggttgaatgtctctgatccaaaaatctgaaatcccaaatgctccaaagtctgaaactttttgagtgccaacatgacactcaaaggaaatgcttattggagcatctcagactcaggtgtttgaatttgagatcctcaaccagtaagaatagtgcaaatattacaaaatctgaaacacatcccaagcatttcaaataagggacactcaactggtattttttttaattttacagtttgccttttaccctgttggttgtgacctttgaggtacagaagtttttaggtttgatatatttttgcttttactgcctgagcttttaatgtcatatcctaaaaattattgacaaattcatcgtcataaagcattttccaaatttgttttccctaggagtttgatagttctagttttacatttaggtttataattcactttgaattgattttaacgtggtgtaaggtaagagtccaacttcattgttttgcatgtagttatacaattttcccatcatcacttgttgaagaaactgtgcttttccattgagtggtcttggcatccttctggaagatcatcggaccatatatgccagggttggtttctgaggtctctgttgtgttggtccataagtgtgtcaagagtgtctttatgccatgaccacattttttctttttggcttattgcagttttgtaattgctttgagacgtttaattttgttctgtttcaagattgatttgcctattcatgggccctggagattccatatgagttttaggataggtttttctgtttatcaaaaatgtcattggaatctttataaggattgtattgaatctaggtcacttcgagtagtgttgacatcattccaagatgaaatcatctaatttgcaaacccagcttttcttttcatttatttgtgtttaatttcttttaacagtgttttgtagttttctgtgttcaaatcttttgccctcttggttaagcttatttctaatttttataatgctgttgtaaatataattttttttttttgagatggagtcttgctctgtctcccaggctggagtgcagtggcactatctcaggtcactgcaacctgcaccttccttattcaagcgattctccaacctcagcctctcaagtacctgggatcacaggtgcgcgccaccatgcccagctaactttttggtatttttagtagagacagtgtttctccatgttgaccaggctattcttgaacttgtgacctcaggtgatctgcccacctcggcctcccaaactgctgggattgcaggcatgaaccactgcacccagccaaatgtcattctttttaaaaatttcttttcttttgttttctctttcttttcttttctttctctctctttctttcctttctttctttttttttgagacggtgtctcactctgtttcctaagctggagcacagtggcacagtctcagctgactgcaacctccaccttccaagttcaagcaattctcctgcctcagcctcccaagtagctgggactacaggtgtctgccactatgcccagctaatttttgtatttttaatagcgatagagttttactatttatattagagatggggttgacccagctggtcacgaactcctgacctcaggtggtccacccgccttggccttccaaagtgctgggattacaactgtgagccactgcacctggcctctttttaaaattttatttgcagattgttcattgttagtttatagaaatggaactgacttgtgtgtgttactgtatcctgaaactttgttgaatttcattattctaccagtattttgtggaatttcaggatttttacacattacatcatgttgtctgtgaacaaaattttgtactttttcctttccaatttgcatgctttttattactttctcttgcctaattattctgagtagaaattccagtactgtggtgaatagaagtggcaggaagagatgttgctatcttattcctgatcctagaggaaaagattttagtttttcaccattcagtatgatgttagctgtgagcttttcatgtataatctttatttactgaggagtttccatatattactaattctttgagtgtttttattacaaaaggtgttcatctggctctggaaccagataaatgttgacctgatagagtggattggaatgtccccttctggtttttgaacatttttggaatattttacaaagggctggcattaattcttcttgaaatgtttggtaaaattttccagtgaagttatctggacctggaattttcttttttggggggtttttgattactggttgaatcttcttactagttacaggtctctttggattttttatttctccatgatgcagtatggtggtttgtgtttctaggaatttataaatttattctaggttgcccagttctgtggcatatggttgctcacattagtctcttgtaatctttttcatttctgtggaatctgttgtactgtcacctcttttatttatgattttagtatttgagatttctctttttttcttaatatagctgtgagttttaaaatttttattgatctttaaaaaaacaaactcagtggttttttttttcctttttttctggtcttattctgcttatctctgttctaatctgttattttcttccttttgcttggtttgtcattagtttttttttttttccctttaggtgtaatgttaggttattgatttgagatctttcttctttttaatttgatcacctgcagctataagcttccctttagcatggctttgagatctttcttctttttaatttaagcatctgtggctgtaagcttccctttagcactgcctttgttgcctcctcctgagtttgggtatgtcatggttttgttttcatttgcttaaacatttttttttgtcctattgtaatataattgtgttgtttttaatagaggtaattaatgaaacacataatgaattgtgcttctgtttttataatattttaagcattcttaactcagaaatgtaaattttagaaaaaaattccaggccaggcacagtggctcacacctgtagtcccagcacttgaggaggccgaggtgggaggatcatctgaggtcaggagttggagaccagcctggccaacatggtgaaaccctgtctttactaaaaatagaaaaaaaatatataaaagctagctgagtgtcatggcgggtgcctgtaatcccagctactctggaggctgaggcaggagaatcacttgaatctgggaggcggaggttgcagtgagctgagattgcaccactgcactccagcctgggtgacagaatgagtccatctcaaaaaaaaaagaaaaaagaaaaaatttgagacatatttatttgtatttcaatttagaaactatgatctcctaagtgtattgacacagcaacctgacataaagataaagaataataagtatataacaaaacggaaacttgcaaataccttttttaattaatttttaattatatatatttaaaaattgccgggtgcagtggcttacacctgtaatcccagcactttgggaggctgaggtgggcagatcacatgaggtcaggagtttgagaccagcctggccaacatggtgaaacctcatctctattaaaaatcaaaaaattagccaggcgtgatagcatgcatctgtagtcccagctactcaggagactgaggcagcagaattgcttgaacatgggaggcagaggttgcagtgagccaagatagtgccactgcactccagccttggtgacagagtgagactctgactcaaaaaaaaattgtctgggcacggtggctcacacctgtaatcgcagcattttgggaagctgaggcaggcagatcacgttaggagatcgagaccatccgggctaacacggtgaaatgccatctctactaaaaatacaaaaaattagccggacgtggtggcgggtgcctgtagttccagatactccggaagttgaggcaggagaatggtgtgaacctgggaggtggagcttgcagtgagctgagattgcaccactggactccagcctgggtgacagagcgagactctgtctcaaataaaataaaataaaataaaactaaggtgtggttgacatacaaaaattacacatatttaatatatacctttgtgtgtgtgtgtgtgtgtgtgtgtgtgtgtgtgtgttacggaggttttactcttgttgcccaggctggagtgcagtgacacgatctcagctagctgcaacctccacctcccgggttcaagcaattctcctgcctcagcctcctgagtagctgggatcgcaggcgtgcgccccgacacccggctaatttttgtatttttttagtacagacagggtttcaccatgttggccaggctggtctcgaactcctgacctcagatgatccacctgcctttgtctcccaaagtgctgggattacaggcgtgtgacaccgaatatatacatcttaatgagtttagagataagtattcgccccaggactcatcacaacaaataatgccgtaaacttgaccatcactccccatatatttctcattctgaccctttttaaaaaatgagaccgggagtggtggctcacgcctgtaatcccagcattttgcgaggccgaggcgggtggatcacgaggtcaggagatcaagaccatcctggctaacacagtgaaaccccgtttctactaaaaatacagaaaattagctgggcgtgatggcgggcacctgtagtcccagctacttgggagactgaggcaggatagtggtatgaactcgggaggcagagcttgcagtgagctgagatcgtgccactgcactccagcctgggcaacagagtgagactccgtctcaaaaaaaaaaatgagatgaccatttcacctaaaatataccctcttaagttttattttaagtgtacaatacaggacggccatgcatcagagatatatgtgggtttggttccagaccactgcaataaagtgagttatacaatttcttttggttttccagtgcatgtaaaagtatgtttatactgtgctgtataaagtgtgcaatagcatatgtctacaaagtgttcacactttaatttacaaatactttattgttaacaagtgctaacagtcatctgagccttcagaaagctgcaatctttttttgtgtgtgtgacagggttttactctgtggctcaggctagagtaattgcagtctcaacctcatgctcaatcaaacccccacctcagactcctgactagctggaactacagatacatgccaccatgaccagctaatttttgtatttttttttttttgtagagatggggttttgccatgttgccttgacttcctgggctcaagcaatctacccaccttggcctcccaaggtgttgggatgacaggtgtgagccactgcacctggccaagtttcagtcttcttgctgatggagggtcttgccttaatgtaaggtggtggttgctgagcgttggggtggctgtggcaatttcttaaaataagacaccattgaagtttgctgtgtcaattgactctccctttcacaaaagaattatctgtagcatacgatgttgtttgatagctttttacccacagtagaactttcaaattggattcaatcctgtcaaaccttcgtacagctgtaccaactaagtttatgtattattgtaaatcattgtgtcaatcctgtcaagccctccttctgctgtaccaactaagtttattctaaatctgttgtcatctcaacattgtttacactgtcttcaccacgagtagatttcatctcaagaaaccactttctttgctcatccttggaagcaactcatccactcacgttttctccggaggctgctgcagtctcgccagatcttcaggctctgtctctgattctagtgctcttgttatttccaccatatctgcagttacctcctccacagaagtcgtgaacccctgtgtcatctgtgagggttggaataatcttcccaacttctctctctctctctctctctttttttttttttgagatgaagtcttgcctgggctggagtgcagtgatgcgatcccagctcactgcaacctccacctcccaggttcaagcaattctgcctcagcctcccaagtgtttgggattacagtcacccccgaccaggcccagctaattttttgtgtgtttttagtacagacaggatttcactatgttggccaggctggtctcaaattcctgacctcgtgacccacgtgccttggcctgccaacatgctgggattacaagtgtgagccaccacgcccggccccaacttctcctaatgttgctattttgatcttattttttaaatcatgaatgttctcaatgacatctagaatggtgaatcctttccagtaggttttcaattattttgcccagatccatcaaaggaatcactttctagagaagttatagctttatgaaatatatttttaagtgataagacttgaaagttgaaattattctttgatccaagggcaccagaatgaatgttgggttagtaggcatgaaaacaatattcagctctttgtacatctctgtaaaagcccttgagtaccaggggcattgtcagtgagcggtaatactttgaaaggaatcttatttcttgagcagtaggtgtcaacagtgggcttcagatattcagtaaaccatatttgtaagccgatagtctgtcatccaggctttgttcccatttgtagagtacagacagagctgtgttttatcataattcttcagggcccttggattttcagaatagtaaatcatcattggtttcaagttaacatcaccaactgcattagcccttaacaaaagagtcagcatgtcctttgaagccttaaagccaggcatcaactcctctctagctgggaacatcctagatggcatctccttctagtagaaggctgttttgtctccattgcaaatctatttagtgttgccatcttaatcagttatcttctagatagctttctgcagcttttccatcagtacttgctgctttatcttgcgcttttatgttatggagatgacttttttccttaaacctcaagaaacaagctcttctagcttcagactttccttctgcagctgcctcaccactctaagtcttcatagaattgaagagaggccgggtgcggtggctgtcacacctgtaatcctagcactttgggaggccgaggcgggcagatcacctgaggtcgggagttcgacaccagtctgaccaatgtggagaaaccccgtctctactaaaaatacaaaaaaatagccaggtgtggtggtgcttgcctgtaatcccagctacttgggatgctgaggcaggagaatggcttgaacttgggaggcagaggttgcgatgagccaagatcacgccattgcactccagcttgggcaagaagaatgaaactctgtctcaaaaaaaaagaaaaaaaagtaaaaagagagttaggcttaggcttaatggaatgttttttgtttttttttcatcttctatctagaccaattaaactttcttcataacagcagcaagattgtttagctttttatcattcatgtgttcactggagcagtactttaaatttctttccagaacacttcgtttgcattcacaacttggctaagtgtttgttgcatgaggtctagctactggcctgtcttgcttacagcatgccttcctcactaagcttaattatttcttccttttggtttaaagtgacagacatgcaactcttctttcatgaacatatagaggctattgtagggttattaattggccacattttaatattaataaaaagaagcctgagaaaaagagaaagagaaatggcccgttggttgggcagtcagaacaaacgcatttgtcaattgtttgctgtcttatcctggtgtgatttgtggttcccaaaacaatgacaacagtagcattaaagattactgattacagatcaccacaacagattcaataataaaaatcttaaaatactgtgagaatgaccgaaatgtgacacagagacgtgaagtgagcacgtgctgtaggaacaatggtgccagtgagacctgcttattgcagggtggccacaaaccttcaatacgtaaaacacatggtcacaaaacacaataaagcaaagtgcagtgaaacaagatgtgtctgtcttttgatagactctgacaatctctacctttgaattggtacattcataccattaacattcaaagtgattattgatatcattggattaatatctactatatttgttactgttttctattcattctcctcagtcttcattcttttgtctaccactctttttctgccttttgcagttttcattgatgattttagatgactccattttccctgtctttcttagtacatacttctctttttaaaacttttttttaactagttgccacagaatttgcaatatacatttacaaccaattcaagtccactttcaaataacactatccaactatcccacaaataagactacctgcttaacaaacaaaacacctaattcctcagtaacatttacaaccaattcaagtccactttcaaataacactatcccactatcccacaaataagactacctgcttaacaaagaacacacctaattcctcaatatacatttacaaccaattcaagtccactttcagataacactatcccacttcacgggtgactacctgcttaacaaagaaaacacctgattcctccctcccatccttccattccattccttgtattattgttccttatttcacttgtgtataagcatgcataatctatctgtgtgtatttattattatctacaaacttattggtcagatcaattatgaataaatacatgtttttattgtaccacaatgcctccctaccatccttccattccattccttgtattagtgttactcatttcaattgtatataagcatacataatatatctgtatttgttattgtctatgatcttcttggtcagatcaattaagaataaatacataggtttttattgtaccacaattctttctttaatgctctttttaaaaaaatgttgatccaggtttcagttatatatcttttgtttccctaaagaatttcatttaacatttcttgcaagacaggtctcctggcaacaagtttcttgaatttttatttttctgaggaaggccttaattctccttcacttttgaagggtggtttcagtgggtacagaaacttaggttggtgggttttttctgtcaacattttgaatttttcatttcactgtcttcttactttcacagtttctgaaatgttgaatgcagttcttatctttgtgtctctgtaggtaaggtgttttctgccccacctctggtttctttcagagttttcctttatcttttatttcatatagtttgaaaattatatgtccaagtgtaggttgttggtatttattctgcctggtgttctcagagcttcctggatctttggtttggtgtctgacattaatactggaagttctcagacatggttgttgcagaactttcttctatttcttctcctcttggtattctcattactgtttcaccttttgtagttgtcccacagtcttgaatatcatcttctgttcttttcagtgtttcttttctttagttttcgaagtttctgatgataaatcctcaagctcagagatttttactcagctgagtccagtctactaataagccatcagaggtattcttcagttatttaccacgtttttcatcactacattatgttgaaagttcttacgatgtctgtctttctcattacattacccatctacacttgaatactgtctacttcattcattaggcccttagcatattctccagaggtttaaaaaaaaattccaagatcatatctttgtctgcttctgaagcttgctctgttgacacaaattgtatttttttctttttttggattttagtaagccttgcaattttttccctttattctgatgcatgaagtacccactaaaagtgactgttgttagtatagcttcagtaatgcggtgatgaggtgacagggcaggtgatgctctcttagtctctttaggctactataacaaaatacttcagactgagtaattcataaacaacagagattattgttcacagatctggaggctggaaagtacaagactaaagggccaggatatttggtgtttggtgaaggtcaaacattcagacactctcaacgactatagcgacagcagcagtcttcaggaatcctatgtgagggacaaacactcagaagccagctggagtgttctagaatcctatgtgagggccaaacattcagaccccagcagtagtgttgtggaatcctatgtgagggacaaacattcagaccacgggagcagtgttctggaattctatgtgaaggacaaacattaagactctcatagcagtgtcctggaatcatatgtgagggacaaccattcagacaccagcagaagtgttctggaatcctaggtgtgggaaaaacattcagaacctagtagcagtgttctggaatcctatgtgagggacatacattcagaccacggcagcagtgttctggaatggtatgtgaaggacaaacattcagacccttgtagcagtgttccagaattttatgtgagggacaaacattcagaccacagcagcagtgttctggaatcctatatgacggaccaacgtgcagacccttgcaacagtgttctggaatactaggtgagggaaaaatattcacacccttgtagcagtgttctggaattctatgtgactgacaaacattcagactccagcagcagtgttctgtaatcctatgtgagggacaaacatgcagaccccaagagcagtgttctgaaatcctatgttaagggaaacattgagaccccagcatgaatgttctggaatcctatgtgagtgacaaacattcagaccacggcaggagtgttctggaatcctatgtgaggaacaaacattcagaccacagcaggagtgttctggaatcctatatgaggtataagcattcagaccctcatagcagtgttctggaatcctatgtgagggagaagcattcagagcacagcaggagtgctctggaatcctatgttagggacaaacattcagaacctcgtaacattgtgctggaaacctatgtgagggacaggcatttagaccctcgcagcagtgttctggaatcccatgtgagggtcaaacattcagatcctcgcagcagtgttctggaattctatgtgagtgacaaacattcagactccagcagcagtgttctgtattcctatgagaaggacaaacattcagaatccaggagcagtgttttgaaatcatatgttaagggcaaacatacagaccctagcatcaatattctagaatcatatgtgagggacatacattcagaccctcacagcagtgttctggaatcctagatgggggacaaacattcagaccccagcagcagacttctggaatcctatgtggaggacaaacattcagacaatggcagcagtgttctggaatcctatgtgagggacaaacactcagagccttgtagcagtgttctggaatcctatgtgagtgagagtgcctggagcctacccaacctgacgcccccaaagccctcacagggtctgacctcccagcatgcacctgcctctccctgaaccccaactgcccaccctgcctgttccccagcctcctccatcctgtgcagcccatagactgtgaccatctctccagccactctggcccttcctttacctttgtcctgtcagaatctctgagcaggatctcccaggtccatccaaatatgtgctttgtccacttttgactaggcccttgggcatcactgggctatcccagctgtccacagggccttcaataatgcacattgcacctggcttatccaagcagtgctcagcagcccacattgaccaggtccctgctgaccagaccctgcacatcaggtcctccctgatgacaccctcactgattagaccctcatgaccaggccccactaacaaggcccccactgccgggcacacaatgacaaggactccactgaccaggaccttactgacaaggactcactgacaaggcctcatggactatgtccttactgacaagtcctcactgactaggtcattattgacaaggcctcactgatcaggttccactgatcatgaactcattccctggcccaaagatgaggccccactgaccaggcctccagggaacaggttgccactgatcaggcccctaataatgaggccttatgtcaccagatgcccctgactgggaccctagtgagtagaccccactgaaccggcaccaaatgctgagattcccgctgaccaagtcaccctgtagaccggtgctacaaaagtcaccactgaccaagtcctctctgaccaggacactacagattaggtcccgccgacaaggctgccctgaccagggccccactgacaagggcctcactgatgaggacacgcccaccagggtctgctgactaggtcccatgtgccccgtcctgcactgagtagcaccccttgacctggtcaccagtgccccagcccatgctgaccagaccagcactaagccccagctgaccaggtctccactgatcaagccccacagcccaggtttgcactgaccagacaccaaacaactggcagccaataggtccccactcaccaaaacccccactactagaccccactaatgagaccctctctaagcagacccctgctgaccactatcccactaaatagtcctcactgacctaggtccacggaccaggcccacactgatcaggcccctcctaaccacactggaaatccaagcggcaatgacatgtttcatatggcagaagttggaacaagacagagagaggaaagaggttccacagccttttaaactactagatctcatgagaactcactcactatcaggaggatggcattaagggcttggtgctttgccatttgtgaaggatccactcccactttttatgattaaagctttttccacctaggccccgactctaacattagggagtgtactttcacatgagctttggaaggggcatagagaaaaaccgtattattctgtccctgaccccacaaatctcatgtccttctcacattgcaagatacagtcatgccttgccagcagtctcccaaagtcttaactcatttcagcattaactcaaagttacaaagtgcaaagtctcatctgggtcaaggctacattctcttttgcctacaagtctctgaaataaaaagcaagttcactgcgtctaaggtacaatgatggtacaggcattgtgtaagctttccatatccaaaagagagacattttccagaaagcttcttatttttatctgaggccccctcagcctggccttcactgtccatgtttttgtcagcattcttgtcacagccatttaaccagtctctaagatgatccaaaaatgttctcatctgtcttctttggagccctccaaactcttccaacctctacccattacccagttccgaagttgcttccacatttttaggtatctttatagcagtgctccagtcctcatttgacatttttggtaagatttatcttgaaaaagaggtttaattggctcatggttctgcagagtggacaggaagcttagtgcttctgcttctggggggcctcagaaatctttcaatcattgtgcaaggtaatgaaagagtgaattgtctcacatggcaagaggaaatcacggagagtagggagtgatatagagttttcagtggccagatctcacgagaagtcactcatgattgtgaggacagtaccaaggggatggtgctgaaccactcatgagaaatttgccttcatgattcaatcaccttataccaggatccacctccaacattaggaagcataattcaacaagagatttggtggggacacatattcgaattgcctcatcagtctttgagtataaagacatccatagcaggctttatccagccagcttctttgggattctttatagggtttcagatctatagaatatccactaaaatattcctacttcaaaaggcaataaagtaagtggtattatcattcttcaaaaagttataatggtagtgtaggcattcatagtatgatttagttcatttgctactgtttctattctatcaccatattaacactttcgtacacaattctatattcagctgggtttcagttgagcacaaagtcatccttgtactaccaccgatagctggcaccagctctttgatactgttatcattctgctgtagaaagtacccgtgaactggaaaaagtccacactcgaatagctagtcattcaacactatcaaattttaggtgactttttgaaaaaatagtatctcttgttgcaagaaatgctccatctgtgatttcaagtctctcacttgagtgaattggatggaagtggtgaatttcagccaaagtggccaaagaaatcctgttcctgtgataatgactccatcagcctctgcacctctgtcttcccttctgccacatgttgtctgttctccgtgactttggtaagagcttccttgtgtatgtgaatgatgtccaggatgtttgtcttgtgtccctgagacagcactaacaggtccatggctgggtccaggtccttcctggactgactggcaaagagctcactgacagagtggaaggcatctatactgaagtggatggcctggtccagctccaaggcctggctgaggctgaagaagaactgtcaggcttctgatgctctttctcaaagcctgccaccactcattggctgtgaagttgacctgagtgccctgttgtccatcttcttgatgaagcacttgaagccatcaatcttgctctcccactcctaaaagttgagtgtcacactgggggtgggctcagggccaggaagaatctggcactcaccatctcatccttctcagccttcctcttgccctgtctccaggctatctcttcagtgctggtggggcacatcaggaagtgacaaaaaatgtggcactgcacctgcatccagaagctggctgtgtggttcatctgcaagattgggccctttctgcacttgaacatagatccacttcaccatagatgccttccacactgtcagtgagctctttgcccatcagcccaggcaggatctggacccagtcatggacctgttagtgctgtctcagggacaccaggtcaacattctggacatcatccacgtacacaaggaagctcttaccagagtcctcctcaagatggcctgtggtctgcctcttggcacccgagaagcccacagtgctgtagaagccccgatgcttggactggagccccaaaggcggcacacaccccagttctgagcctgctgctcatttcctctatgtggctccatttgcagcacatttgttgcactgagacctgtgcatgccaggcaaagccaagctggctcaaagagcaaccacccacctctgcaagggtgtgccaggagccagtggaccagccaccaacgtcactccctgccagtcagggtaaatcagttattctgccctggaggtggagccccagtgccatctgcttttcctcaggcctccactccatcagctgtcaggtggtggtcactcagactgtgggaaactggccatccctgtttccttgagtgcgtgaggttggtgactgctccacctgctactggcatacccttgcagaggtggctggttgctctttgagccagcttggccttgcctggtatgcacaggccccaggtactgagaagctgctccgagtaagtttgtcttgggccaaattctaagtctggccagggccacagaaggccgagtcccctgggtggtaatcctggctgctgcaggggggcccatggtccccctcccctcccagggctcaggatgaggtccgactgggacaggatgctttaggtatgggacttgtgccccaggaggggacctctgtcacacacgttgggtgagaatatgtatggcatgctgctggctgccagggctgttgggatgcacgttcacccttcccttcagggacctcaaagtgaccagcttcccctttatgagtgacttcccaaggcccaggagccatttggggctgcagagcagctggctgcatgctgccctggcttcttccatgttgtgctggtcactacctaccaaggggtgtcagatgcaggcacaatgtaggacgattgtctctgggcctgtgtcttggttatcatggagctagactgggcctggtgacagggccctgatggggttgtcctgtgtggtcacggaggtgatcagaaaagatgcagaatggaattgctgcgaggatgaatgagatgactgtcagcacataacaggcagctggtgagtgttcagggattaccctcagtagctgcccagagaccaaaaccatccacctgatagtgacttttcccaagccagaaggaagagaaaagagcaggtcccactcacctgaatctgatcagtgagctgtgttgagatgtgcctctcatctagaaaatggtccttcacgcagagctactcacagacactgctgtgtgtctctaactgctccacaacacagaggcgatggggactcagcaacagtgacattctggggtgacacaacccaccaccatgggagtctgcttgggtcaacagggcccagagtccgtgtcctctatcccctgaactgacatgtgtgtatgcaatgtatttgtgtatgcatatgtgcctgtgtgtgtgtgagtgtgtatgtgtgtgtttgtcttgcttctctggacaggcctagcttctccactcatgggtgcacccaggtcctcatcactgtcaccttagagcattagagcctctataggtgctccccaatctctgccctccccacccatggtggtcctggggatgcagacagaggaggggcactgcataatgctgagagggctggcaccctctctaggtggaacacaggtcatttgtaaagttgtaggtctgccaagcagtattggattcaacacatcttctcaccttctctttccagccaccctccagggtgccccgactcactttccctgcagatggaggcaaggaggctccacagacaacccccctgcctgaggtcacatagtggccagcaggccaggtactgacaaactgcccctgaccaggttcccagtgatgagtgatgagacccctaatgaccactcctccattgaccaggtcccactgatcaagtccccactgaccatgtcttcctaaccaggcccacacttaataggcctcatgggccagaccccactgaccaattttccactgacctggtccccattgacaagacagggttcccactgacaagaccacaatttaccaggttgctgctcaaccgaccccccactgaacaattctccatgaacgagtacccagctgactgagccccctctgaccaggccctcactgaccaggctccaagccactaaggccccacactgaccaggcccgtgatatattgtgtatgccccaccaaccagtttttcattgtttatgttccaacagatcaggccccactaataaagccaccactgactaggtccccccactgaccaggcttccagtgactaggtcaccaggtccccactgatgaggcctttactgaggaggccgccactaaccaggcccctgctgatcaggtcccaaatgaccaggtcctgatgaccaggtcatctctgaccatggtccactgaccaggccccggagcaacggggttcaaagtctcattacaatgtccccctcagctcatagaccctccctccctgcatgtgtgcccagaagtcaggccctggggtttttttttgggacgtggcctttcctccaagacacagggagagacagttggcctcaggctccaggttcccagctccacactcaccccaaaggccctctgggcccgtctcaaaggagaaagtgaggtggcctgacactgcctggacacaccatctaccctattcctgagtgtcagggtgtgaggaagggagggacatttggtagataaggcacgctgtgctgttgggtctctcagggcccttcccacagagccccgatctaaagacagaacacagaggctacaggaagactaatccagaacctctgagacagccagggaccacatgaggactctccccagacagccagaaggccctttgctagtttcttggtacttcagtggatgtggcagtggttcttctgttggggaccagtgagtacacactggggagggctcacctgtgcttcctcagtggctccacctctgcttctaaaaaaaatgactcattccagagctggcgcagagaaaatacaagctgagcttagaacatcttctgccagaaagtaaaaaagtgccgacagagtaatggagacaaatcaaagagacataaagtcagcttggaatgtctactactggcctaatcttggggaattggagcatcagaatcatgagctttccttctcccttatttattggttttatttctccatgtagaacaaagaagagaataagaaaataatcatctggtaaccatcatagtaataattgttcaaacacaagtcatccatgaaatgctaaatctagtgggttctgaggagtaaccagatatttacagagcctcaaagtatctccatacaaaatacggttgaactacaaaaagaaaattgtaacattagcatggacaaacctggcaggtactccttaactctcctaagtaataaaaactgtaaaatgcaaataagccttcgatgacctttactaacctttactaaagtatcagtgatgacttggttgtttaaacagctgacatttgggcaatttgagtatgtcaaactcaataatactggttttcatttgcaagatccacttaaaacttaaggaggccaaaaaacatcatttaaaataccctataaattataatcatacatatgatacaaaaatatcctacttcagtaaatattggaatgttatatattttatgagaaacaattaaaatgtgtaaatagcccagtaataaagttttataatcttttaaatcatcatagaatttttccttaagactttatggttaaatattctcttcattagatgtggcttacccgtggattctagagaagaaagtagatgggagcaagtgtccaatacagcaacagctggaaagaaaaataaagaatcttgttctttacctaaaacacttcagttaactaagtgtgagtttaaaaactaaagattgagaactttatcagagttaataagaatgagaaatatgtatgtacatttacaatacaaaattactatttaataatttacacatggcattaattctaattgtgtttaaatatcagaactttttcagtcttcattcatgtaatcaacagccacatgctaaggtactagaaccagcactggaattacaagatgaagatggcatggtccacctctcaacagtcataagctataacctaaaaaacagacaggcaggcaatgtccatatagagtcatagataccgtgacaggtatacagcagggcactactggaacacagagaagggacatctacccacttttatgtcaatatcatgggctttctggtggaggagataacataggttgatacctgaaggacaaggaaaagcttcccagatagaggaaagaggcaaaggcaaagagcctgaggtgaggaagagccctgcagagttccactccatccagtttggtgctagagcaaagggcagagtgcagtaagtggtgagaaacaaggctgagtaacttggcaagaattacattgacatgggtgtttttatttcatggtgaaaaatttggaacttttcctgagaacaagtgtaagccaatgacacagtaaattagaggagatttaaaatgtcacctgtcaagtgactgcttatgaagggttattgctcagctaagtatttctgaatgagtcttagtctgttggccttcaatctctaccgaaaccctgagaacttgatgatgcttttgttttctgagaatcgtttcagtgtgctggctgacagttccatgaggatggcaaaacttaagaaactgtagagccagtgaaaaagagatgcacagacttcttgggaactgtttaagcttaggaacatgatgaatttatggtgcataagtacagtcttctctgtgaaagtttttgttttcacatctttcattagatgtgtgtaagaaaaaaatattgatgtagtatctactaacccaagaatgaaaaggaatgccatttgctatttacactttatttctaaaataaacctaaatttaattaataaattttgtcaacgtacttctctttgtttctctaattatttattctacacagtccagccccatctaaaataagtaaaaataataataatgtctaaattaaacaagaaacattatcatgaaaatcatgtatcacttacaaaatgtggcctttagtatttttagtgactagacataacttgaagtttgcttaaatagaaaaataatcacataaataaaataaaatttctacttattttaagtttagataacagaggatgtatatgtgtaatgctgtttagagtaatctgacaaaaatgcagttaatattgatctattgcatatacatgattttagaaaggtagtgttttattagtacaaaggttaaacaatggccaggcatggtggctcatacctgtaaccccagcacttggggaggccaaagcaagcagatcacaaggtcaggagatcgtgaccatcctggccaacatggggaaaccccatctctactaaaaatacaaaaattagctgggcgtggtgatgtgcaccagtagtcccagctacttgggatactaaggcaggagaattgcttgaagccaggaggtggaggttgcagtgagccaagactgcaccactgcactccagcctggtgagagagtgagaccctgtctcacacacacacacacaaaaaaagattaagtaattaaagccatcttttgcaatgaatgcattgctttgaaattcttagaaaactttgccctttataaaagtttaatccattttttacttcaataaattttatcttaaaaagaaatttctgttctctacttatagtaaacttttcttttttttttctagtttgtattctaaattaacgtggtacctctgtaagtttcttccaaaggcatattgagggataccgaggtttgcagtacaattaaacccatcacacaggttgtgagcataggacccaagaagtagtttttcaaccctggctcactctgtccctccccattcttatttcccagtgtctattattcccacctttatgacaatgtgcacccaatatgtagctcccacatgagtgaaaacatgagatatttggtttctgtttctgtgttggtttgcttaggagagtggattccagctgtattcatgttgctgcaaatgatgtgattttgttcttttcatggctgcatagtattccatggtatatatggaattttccaatctaccttggattttcaatctaccttggatgtacctggattgactccacgtctttgctattgtgaatagtgctgcaatgaacatacatgtgtatacatctttttgttacaatgatttattgtcctttcggtatacccctagtatagtaatggggttgctgcatccaacagtcattcttagttcttaatttccaaactgctctccatagtagctgaattaatttacattgccacaaacggtttgtgttcccttttctccacagcctccccaacatccttttttaagtttttatttattatttgtttttaacaaaagtcattgtgactggtgtgaaatggtatctcattgatgttttgtgtggcatttttctgatgattagcaatggtaagcattttttaatgtttgttggccacttacgtgtgttattttgagaactgtctgttcatgtcctttgcccatttataatggtcttatttattttttgcttgttgatttgtttaggtctcttatggattctggataataggcgtttgctatatccatactttgtgaatattttcttccattcttttaggctttctgtttaatctcgtgatagtttctcatgctgtgcagaagctatttagctaaattagatcacacttgtcaatttttgttattcttgcaattgcttttgaggacttagccataaattaattgacaaatatgatatccagaagagtatttcctaggttttttccaggatttttatagtcagaagatgtactcttatgtaaagaaagcacaaaccttttttttgttttgttttgagacagagtctccatcaccaaggctatagtgcagtggtatgatcttggcttactgcaacctctgtctcctgggttcaagtgattcttctgcctcagcctcctgagtatctgagattacacatgcctgccaacacgccttgctaatttttgtatttttactagagacaggtttcatcatgttggccaggctggtctcaaactcctgacgtcaggtgattcacctgcctcggcctccccaaattttgggattacaagtgtgagccaccatgcctggccaagcacaaagcttttaaaataaaaagggaaatgaacattttagtgttttgtttaattcataaaatgcaattattttggattctactaaataataaacatccatatgtggcaaagtggatgctaatcattcagtcgtgattatgggtgggaagaattgagatggtgcaaataaacttttttaatttttttttttattttcaagatggagtcttgccctgtcacccaggctggagtgcagtggtgcaatctcagctcctgcaacctccgtctcccaggttcaagcaattctctgcctcagccttcctagtagctgggattacaggtgcccaccaccacaccaggctaatattttttttgtacttttagtagagttggggtttcaccatcttggccaggctggtcttgaactcctgacctcgtgatacacctgcctcagcctcccaaagtgctgggattacaggcatgagccaccacacctggctggtgcaaagaaactttaaaagtggcatgggccgggtgcggtggctcatgcctgtaatcccagcactttgagaggctcaggcaggcagatcacaaggtcaggagttcaagaagagcctggtcaatatggtgaaaccctgtctctactaaaaatgcaaacattagctgggtgtaatggtgggtgcttgtagtctcagctactcaggaggctgaggcaggagaatcacttgaacccgggaggtggaggttgcagtgagtggagatgacaccaagacactccagcctgggtgacagagtgagacactgcctcaaaaaaaagaaaaaaaaaatgtggtatgaaccacagctaaactataatcaattagaaagtaagccagaccatctcaaagtatatcatcacttatcaggcaataacatgcaatttctaaaacctaacttaaatgcagcttttaaagacatttcaaacatgtcagtttagtcacatttattgaataaagttagcaaatggatatctcttgaaaatgagagctccagggaattaaaaaatgtaaagttcccatttcctttctgtgttaacacagctaattgtgatctttacttcacatgcaaaagtcaacagaacaactcagtatttcaccaaattataaacaagaattacgctagagaaatgaaaccctaaagagaaacggtcatataactaacctcagtcaagtagttctggcagttatttgaagtctgaggtttgaagtaggaattcttacgggcatttggagaatatattttctgttgagtcctatactagtaagattttcaacacaaggtgactctcgacctcgccttgtaggaagagtgctgagaaaatatttcacctgctctttctccataaagagctgatactgatcattgctattttcttattcgatctgtaaaggtagcaaagacaaatgcttaatatttcatttttccttaaatgattcttaatgacttgcagtttttaaaaacttaccctgagagtaaaccaaattacccactaaatagtgttttcacacagaagatgtgtaagagcatacctgttgtaaggaattataattttaaaatcattctaaagaagcaccattgtttctaaggtgatttctactgaacaagcagttcaaacaaagtagacagggaagagaaatggctatcagtgatgtatggctcaacaggtaaaacttcctgccttctaaaatggctgtacttggaagattctgaagattccattagaaatacttgtatttaaagggtaataatgtgggaaaatgaatatgttgatttgcttgattataagaaccacttcactagaaataattatatcaaaacatcatgttgtactccttaatgtaggttaagaaaactaaaatgaacgaaaaaaaatctaggaacacttgtgtttagtaaaccagttttagatttcactcttgtacatttcacccattatctaggaccaattaaacatttggcactgaggaataattcagagcaacaactcctaggggagaactagattgtctggttggtgatcaaaaagaattaaagcatctctgaaggcaattagtccccaacactgtgaccaaggccctggaggtggggcatgttctttctgccttccacacaccgcttcaggctgaacaaggtgttattttttaaccgctttgtgaattacacttctttaaattcctgtgataattattccctatttcacaagggtgcctttctgtaacatcttgaatatgttacacaaatagtctttcttgaggcaccctctggtgataatactaaagatcacaatcaaaaacaattgtgcccagagtagaagtaccactttgcatttaggttgtgatccactgaaaagtaaattaaacacattaatatttctatttagggaaattctgacaagtaattttataacaaggtcacttcattgattataaagcttcaaaaatacttagtgaaaaaaactaacagatcaggttaattacatgagacttttcaggaaaaaaagccatacaaaagcaaaaaaaaaaaaaaatgagaggagagacaaaaactatctttgactaacattttaaaggtaaaattatttactaacattatttttcaaaattacattgtcaaattagcattcacttccttctaatctgaagccatctcactaaaaattatgcttttgaaacaaattaatgagcttaattcattttctatgagtgtatgttttgacttacttagttaattttttagacatggaactgttagctttcaatgctgctgcaaaggcttccttatattcttctaactcagttgtaacctcttcataagcagttttcattttgtagaatttacattccacatctttaagtgtgagttccttcttatttagtgaagctgtattatatccttgtttaactgctctaattgttttttatattgtgcttgttcctaaaacagaggaaaagaatacacttttaaaacaattataacctaattattatgtttgttgcctttcattttgagtcagcgattcaaagagtatttttgaatatgttaaaaaagaggatgaagtttaaaatatttcagcaatatcaaaactaataactgaattcagaattaagtctgatttgtaaaaatttgaaatcataattatgctagtattaatgtaatctggtcatataaaaagtaatagaatccattcatagtcttaaaaagtgatcaatgaacactgtagcttaagaccaattcataattatcacataatttctaaatcacaattttttcctatgccaactggtcttaatcatcaaattactccataatgagaatcattactctgaaagattgattttgttataataataatggaaatttaaatatttaaaagaaaaaacagataccatttttttctagaactctacaaagcagattgctacaagagaggcaatctctctctctctctctctctctctctctctatatatatatatatatatatatatataatctccaaaatataatttgcagtgaaataaatgaaagcacattacaagtaaacttacctgatttaaacaactcacctgtaaatggatttcttctaatttttctactgcctgcattgccctttcatctagctctgatttatattcttgtagtttactaagttctaccatactgttttccatatgtgtcttaagatttaatatttcttcttccaacatctttttatcctcctcaagtttttcacattcctgttgtacttttttcatagataataactcctgttgaaaaacttgattctctttagccaaattgacacattttgaagatacagcttccttctccgccataagatcatcaaactgcatgaataaaatagtatagcttgataatgaagtaggctgagaataatctaatacaaaaccaatagcaaattttgaaatgcatttacttgcaataaaatgttatctgtaatgcagcagattcttcaaatgtgaacccttaaattattcagaattttaagaacaaagttaaagctaccatgagtcataaaaatatattctttactatcatcatctttgccacagaatttttgtacttcattttacttttatttttctgataattcatttttgttcctccttaaatggcacaaagttatctcctagtaaaaagtgtctaacccccttccttcattatcattccccacagtatgtcaaaaaaagtttcagagatatcatattgagttatttaggccaaagtcaataaatgggtctaggaataagactttgaaagtgatattacactctatattaggcatggtggctcatgcctgtaatcctagcactttaaaaagctgtggcagaaagatcnnnnnnnnnnnnnnnnnnnnnnnnnnnnnnnnnnnnnnnnnnnnnnnnnnnnnnnnnnnnnnnnnnnnnnnnnnnnnnnnnnnnnnnnnnnnnnnnnnnnnnnnnnnnnnnnnnnnnnnnnnnnnnnnnnnnnnnnnnnnnnnnnnnnnnnnnnnnnnnnnnnnnnnnnnnnnnnnnnnnnnnnnnnnnnnnnnnnnnnnnnnnnnnnnnnnnnnnnnnnnnnnnnnnnnnnnnnnnnnnnnnnnnnnnnnnnnnnnnnnnnnnnnnnnnnnnnnnnnnnnnnnnnnnnnnnnnnnnnnnnnnnnnnnnnnnnnnnnnnnnnnnnnnnnnnnnnnnnnnnnnnnnnnnnnnnnnnnnnnnnnnnnnnnnnnnnnnnnnnnnnnnnnnnnnnnnnnnnnnnnnnnnnnnnnnnnnnnnnnnnnnnnnnnnnnnnnnnnnnnnnnnnnnnnnnnnnnnnnnnnnnnnnnnnnnnnnnnnnnnnnnnnnnnnnnnnnnnnnnnnnnnnnnnnnnnnnnnnnnnnnnnnnnnnnnnnnnnnnnnnnnnnnnnnnnnnnnnnnnnnnnnnnnnnnnnnnnnnnnnnnnnnnnnnnnnnnnnnnnnnnnnnnnnnnnnnnnnnnnnnnnnnnnnnnnnnnnnnnnnnnnnnnnnnnnnnnnnnnnnnnnnnnnnnnnnnnnnnnnnnnnnnnnnnnnnnnnnnnnnnnnnnnnnnnnnnnnnnnnnnnnnnnnnnnnnnnnnnnnnnnnnnnnnnnnnnnnnnnnnnnnnnnnnnnnnnnnnnnnnnnnnnnnnnnnnnnnnnnnnnnnnnnnnnnnnnnnnnnnnnnnnnnnnnnnnnnnnnnnnnnnnnnnnnnnnnnnnnnnnnnnnnnnnnnnnnnnnnnnnnnnnnnnnnnnnnnnnnnnnnnnnnnnnnnnnnnnnnnnnnnnnnnnnnnnnnnnnnnnnnnnnnnnnnnnnnnnnnnnnnnnnnnnnnnnnnnnnnnnnnnnnnnnnnnnnnnnnnnnnnnnnnnnnnnnnnnnnnnnnnnnnnnnnnnnnnnnnnnnnnnnnnnnnnnnnnnnnnnnnnnnnnnnnnnnnnnnnnnnnnnnnnnnnnnnnnnnnnnnnnnnnnnnnnnnnnnnnnnnnnnnnnnnnnnnnnnnnnnnnnnnnnnnnnnnnnnnnnnnnnnnnnnnnnnnnnnnnnnnnnnnnnnnnnnnnnnnnnnnnnnnnnnnnnnnnnnnnnnnnnnnnnnnnnnnnnnnnnnnnnnnnnnnnnnnnnnnnnnnnnnnnnnnnnnnnnnnnnnnnnnnnnnnnnnnnnnnnnnnnnnnnnnnnnnnnnnnnnnnnnnnnnnnnnnnnnnnnnnnnnnnnnnnnnnnnnnnnnnnnnnnnnnnnnnnnnnnnnnnnnnnnnnnnnnnnnnnnnnnnnnnnnnnnnnnnnnnnnnnnnnnnnnnnnnnnnnnnnnnnnnnnnnnnnnnnnnnnnnnnnnnnnnnnnnnnnnnnnnnnnnnnnnnnnnnnnnnnnnnnnnnnnnnnnnnnnnnnnnnnnnnnnnnnnnnnnnnnnnnnnnnnnnnnnnnnnnnnnnnnnnnnnnnnnnnnnnnnnnnnnnnnnnnnnnnnnnnnnnnnnnnnnnnnnnnnnnnnnnnnnnnnnnnnnnnnnnnnnnnnnnnnnnnnnnnnnnnnnnnnnnnnnnnnnnnnnnnnnnnnnnnnnnnnnnnnnnnnnnnnnnnnnnnnnnnnnnnnnnnnnnnnnnnnnnnnnnnnnnnnnnnnnnnnnnnnnnnnnnnnnnnnnnnnnnnnnnnnnnnnnnnnnnnnnnnnnnnnnnnnnnnnnnnnnnnnnnnnnnnnnnnnnnnnnnnnnnnnnnnnnnnnnnnnnnnnnnnnnnnnnnnnnnnnnnnnnnnnnnnnnnnnnnnnnnnnnnnnnnnnnnnnnnnnnnnnnnnnnnnnnnnnnnnnnnnnnnnnnnnnnnnnnnnnnnnnnnnnnnnnnnnnnnnnnnnnnnnnnnnnnnnnnnnnnnnnnnnnnnnnnnnnnnnnnnnnnnnnnnnnnnnnnnnnnnnnnnnnnnnnnnnnnnnnnnnnnnnnnnnnnnnnnnnnnnnnnnnnnnnnnnnnnnnnnnnnnnnnnnnnnnnnnnnnnnnnnnnnnnnnnnnnnnnnnnnnnnnnnnnnnnnnnnnnnnnnnnnnnnnnnnnnnnnnnnnnnnnnnnnnnnnnnnnnnnnnnnnnnnnnnnnnnnnnnnnnnnnnnnnnnnnnnnnnnnnnnnnnnnnnnnnnnnnnnnnnnnnnnnnnnnnnnnnnnnnnnnnnnnnnnnnnnnnnnnnnnnnnnnnnnnnnnnnnnnnnnnnnnnnnnnnnnnnnnnnnnnnnnnnnnnnnnnnnnnnnnnnnnnnnnnnnnnnnnnnnnnnnnnnnnnnnnnnnnnnnnnnnnnnnnnnnnnnnnnnnnnnnnnnnnnnnnnnnnnnnnnnnnnnnnnnnnnnnnnnnnnnnnnnnnnnnnnnnnnnnnnnnnnnnnnnnnnnnnnnnnnnnnnnnnnnnnnnnnnnnnnnnnnnnnnnnnnnnnnnnnnnnnnnnnnnnnnnnnnnnnnnnnnnnnnnnnnnnnnnnnnnnnnnnnnnnnnnnnnnnnnnnnnnnnnnnnnnnnnnnnnnnnnnnnnnnnnnnnnnnnnnnnnnnnnnnnnnnnnnnnnnnnnnnnnnnnnnnnnnnnnnnnnnnnnnnnnnnnnnnnnnnnnnnnnnnnnnnnnnnnnnnnnnnnnnnnnnnnnnnnnnnnnnnnnnnnnnnnnnnnnnnnnnnnnnnnnnnnnnnnnnnnnnnnnnnnnnnnnnnnnnnnnnnnnnnnnnnnnnnnnnnnnnnnnnnnnnnnnnnnnnnnnnnnnnnnnnnnnnnnnnnnnnnnnnnnnnnnnnnnnnnnnnnnnnnnnnnnnnnnnnnnnnnnnnnnnnnnnnnnnnnnnnnnnnnnnnnnnnnnnnnnnnnnnnnnnnnnnnnnnnnnnnnnnnnnnnnnnnnnnnnnnnnnnnnnnnnnnnnnnnnnnnnnnnnnnnnnnnnnnnnnnnnnnnnnnnnnnnnnnnnnnnnnnnnnnnnnnnnnnnnnnnnnnnnnnnnnnnnnnnnnnnnnnnnnnnnnnnnnnnnnnnnnnnnnnnnnnnnnnnnnnnnnnnnnnnnnnnnnnnnnnnnnnnnnnnnnnnnnnnnnnnnnnnnnnnnnnnnnnnnnnnnnnnnnnnnnnnnnnnnnnnnnnnnnnnnnnnnnnnnnnnnnnnnnnnnnnnnnnnnnnnnnnnnnnnnnnnnnnnnnnnnnnnnnnnnnnnnnnnnnnnnnnnnnnnnnnnnnnnnnnnnnnnnnnnnnnnnnnnnnnnnnnnnnnnnnnnnnnnnnnnnnnnnnnnnnnnnnnnnnnnnnnnnnnnnnnnnnnnnnnnnnnnnnnnnnnnnnnnnnnnnnnnnnnnnnnnnnnnnnnnnnnnnnnnnnnnnnnnnnnnnnnnnnnnnnnnnnnnnnnnnnnnnnnnnnnnnnnnnnnnnnnnnnnnnnnnnnnnnnnnnnnnnnnnnnnnnnnnnnnnnnnnnnnnnnnnnnnnnnnnnnnnnnnnnnnnnnnnnnnnnnnnnnnnnnnnnnnnnnnnnnnnnnnnnnnnnnnnnnnnnnnnnnnnnnnnnnnnnnnnnnnnnnnnnnnnnnnnnnnnnnnnnnnnnnnnnnnnnnnnnnnnnnnnnnnnnnnnnnnnnnnnnnnnnnnnnnnnnnnnnnnnnnnnnnnnnnnnnnnnnnnnnnnnnnnnnnnnnnnnnnnnnnnnnnnnnnnnnnnnnnnnnnnnnnnnnnnnnnnnnnnnnnnnnnnnnnnnnnnnnnnnnnnnnnnnnnnnnnnnnnnnnnnnnnnnnnnnnnnnnnnnnnnnnnnnnnnnnnnnnnnnnnnnnnnnnnnnnnnnnnnnnnnnnnnnnnnnnnnnnnnnnnnnnnnnnnnnnnnnnnnnnnnnnnnnnnnnnnnnnnnnnnnnnnnnnnnnnnnnnnnnnnnnnnnnnnnnnnnnnnnnnnnnnnnnnnnnnnnnnnnnnnnnnnnnnnnnnnnnnnnnnnnnnnnnnnnnnnnnnnnnnnnnnnnnnnnnnnnnnnnnnnnnnnnnnnnnnnnnnnnnnnnnnnnnnnnnnnnnnnnnnnnnnnnnnnnnnnnnnnnnnnnnnnnnnnnnnnnnnnnnnnnnnnnnnnnnnnnnnnnnnnnnnnnnnnnnnnnnnnnnnnnnnnnnnnnnnnnnnnnnnnnnnnnnnnnnnnnnnnnnnnnnnnnnnnnnnnnnnnnnnnnnnnnnnnnnnnnnnnnnnnnnnnnnnnnnnnnnnnnnnnnnnnnnnnnnnnnnnnnnnnnnnnnnnnnnnnnnnnnnnnnnnnnnnnnnnnnnnnnnnnnnnnnnnnnnnnnnnnnnnnnnnnnnnnnnnnnnnnnnnnnnnnnnnnnnnnnnnnnnnnnnnnnnnnnnnnnnnnnnnnnnnnnnnnnnnnnnnnnnnnnnnnnnnnnnnnnnnnnnnnnnnnnnnnnnnnnnnnnnnnnnnnnnnnnnnnnnnnnnnnnnnnnnnnnnnnnnnnnnnnnnnnnnnnnnnnnnnnnnnnnnnnnnnnnnnnnnnnnnnnnnnnnnnnnnnnnnnnnnnnnnnnnnnnnnnnnnnnnnnnnnnnnnnnnnnnnnnnnnnnnnnnnnnnnnnnnnnnnnnnnnnnnnnnnnnnnnnnnnnnnnnnnnnnnnnnnnnnnnnnnnnnnnnnnnnnnnnnnnnnnnnnnnnnnnnnnnnnnnnnnnnnnnnnnnnnnnnnnnnnnnnnnnnnnnnnnnnnnnnnnnnnnnnnnnnnnnnnnnnnnnnnnnnnnnnnnnnnnnnnnnnnnnnnnnnnnnnnnnnnnnnnnnnnnnnnnnnnnnnnnnnnnnnnnnnnnnnnnnnnnnnnnnnnnnnnnnnnnnnnnnnnnnnnnnnnnnnnnnnnnnnnnnnnnnnnnnnnnnnnnnnnnnnnnnnnnnnnnnnnnnnnnnnnnnnnnnnnnnnnnnnnnnnnnnnnnnnnnnnnnnnnnnnnnnnnnnnnnnnnnnnnnnnnnnnnnnnnnnnnnnnnnnnnnnnnnnnnnnnnnnnnnnnnnnnnnnnnnnnnnnnnnnnnnnnnnnnnnnnnnnnnnnnnnnnnnnnnnnnnnnnnnnnnnnnnnnnnnnnnnnnnnnnnnnnnnnnnnnnnnnnnnnnnnnnnnnnnnnnnnnnnnnnnnnnnnnnnnnnnnnnnnnnnnnnnnnnnnnnnnnnnnnnnnnnnnnnnnnnnnnnnnnnnnnnnnnnnnnnnnnnnnnnnnnnnnnnnnnnnnnnnnnnnnnnnnnnnnnnnnnnnnnnnnnnnnnnnnnnnnnnnnnnnnnnnnnnnnnnnnnnnnnnnnnnnnnnnnnnnnnnnnnnnnnnnnnnnnnnnnnnnnnnnnnnnnnnnnnnnnnnnnnnnnnnnnnnnnnnnnnnnnnnnnnnnnnnnnnnnnnnnnnnnnnnnnnnnnnnnnnnnnnnnnnnnnnnnnnnnnnnnnnnnnnnnnnnnnnnnnnnnnnnnnnnnnnnnnnnnnnnnnnnnnnnnnnnnnnnnnnnnnnnnnnnnnnnnnnnnnnnnnnnnnnnnnnnnnnnnnnnnnnnnnnnnnnnnnnnnnnnnnnnnnnnnnnnnnnnnnnnnnnnnnnnnnnnnnnnnnnnnnnnnnnnnnnnnnnnnnnnnnnnnnnnnnnnnnnnnnnnnnnnnnnnnnnnnnnnnnnnnnnnnnnnnnnnnnnnnnnnnnnnnnnnnnnnnnnnnnnnnnnnnnnnnnnnnnnnnnnnnnnnnnnnnnnnnnnnnnnnnnnnnnnnnnnnnnnnnnnnnnnnnnnnnnnnnnnnnnnnnnnnnnnnnnnnnnnnnnnnnnnnnnnnnnnnnnnnnnnnnnnnnnnnnnnnnnnnnnnnnnnnnnnnnnnnnnnnnnnnnnnnnnnnnnnnnnnnnnnnnnnnnnnnnnnnnnnnnnnnnnnnnnnnnnnnnnnnnnnnnnnnnnnnnnnnnnnnnnnnnnnnnnnnnnnnnnnnnnnnnnnnnnnnnnnnnnnnnnnnnnnnnnnnnnnnnnnnnnnnnnnnnnnnnnnnnnnnnnnnnnnnnnnnnnnnnnnnnnnnnnnnnnnnnnnnnnnnnnnnnnnnnnnnnnnnnnnnnnnnnnnnnnnnnnnnnnnnnnnnnnnnnnnnnnnnnnnnnnnnnnnnnnnnnnnnnnnnnnnnnnnnnnnnnnnnnnnnnnnnnnnnnnnnnnnnnnnnnnnnnnnnnnnnnnnnnnnnnnnnnnnnnnnnnnnnnnnnnnnnnnnnnnnnnnnnnnnnnnnnnnnnnnnnnnnnnnnnnnnnnnnnnnnnnnnnnnnnnnnnnnnnnnnnnnnnnnnnnnnnnnnnnnnnnnnnnnnnnnnnnnnnnnnnnnnnnnnnnnnnnnnnnnnnnnnnnnnnnnnnnnnnnnnnnnnnnnnnnnnnnnnnnnnnnnnnnnnnnnnnnnnnnnnnnnnnnnnnnnnnnnnnnnnnnnnnnnnnnnnnnnnnnnnnnnnnnnnnnnnnnnnnnnnnnnnnnnnnnnnnnnnnnnnnnnnnnnnnnnnnnnnnnnnnnnnnnnnnnnnnnnnnnnnnnnnnnnnnnnnnnnnnnnnnnnnnnnnnnnnnnnnnnnnnnnnnnnnnnnnnnnnnnnnnnnnnnnnnnnnnnnnnnnnnnnnnnnnnnnnnnnnnnnnnnnnnnnnnnnnnnnnnnnnnnnnnnnnnnnnnnnnnnnnnnnnnnnnnnnnnnnnnnnnnnnnnnnnnnnnnnnnnnnnnnnnnnnnnnnnnnnnnnnnnnnnnnnnnnnnnnnnnnnnnnnnnnnnnnnnnnnnnnnnnnnnnnnnnnnnnnnnnnnnnnnnnnnnnnnnnnnnnnnnnnnnnnnnnnnnnnnnnnnnnnnnnnnnnnnnnnnnnnnnnnnnnnnnnnnnnnnnnnnnnnnnnnnnnnnnnnnnnnnnnnnnnnnnnnnnnnnnnnnnnnnnnnnnnnnnnnnnnnnnnnnnnnnnnnnnnnnnnnnnnnnnnnnnnnnnnnnnnnnnnnnnnnnnnnnnnnnnnnnnnnnnnnnnnnnnnnnnnnnnnnnnnnnnnnnnnnnnnnnnnnnnnnnnnnnnnnnnnnnnnnnnnnnnnnnnnnnnnnnnnnnnnnnnnnnnnnnnnnnnnnnnnnnnnnnnnnnnnnnnnnnnnnnnnnnnnnnnnnnnnnnnnnnnnnnnnnnnnnnnnnnnnnnnnnnnnnnnnnnnnnnnnnnnnnnnnnnnnnnnnnnnnnnnnnnnnnnnnnnnnnnnnnnnnnnnnnnnnnnnnnnnnnnnnnnnnnnnnnnnnnnnnnnnnnnnnnnnnnnnnnnnnnnnnnnnnnnnnnnnnnnnnnnnnnnnnnnnnnnnnnnnnnnnnnnnnnnnnnnnnnnnnnnnnnnnnnnnnnnnnnnnnnnnnnnnnnnnnnnnnnnnnnnnnnnnnnnnnnnnnnnnnnnnnnnnnnnnnnnnnnnnnnnnnnnnnnnnnnnnnnnnnnnnnnnnnnnnnnnnnnnnnnnnnnnnnnnnnnnnnnnnnnnnnnnnnnnnnnnnnnnnnnnnnnnnnnnnnnnnnnnnnnnnnnnnnnnnnnnnnnnnnnnnnnnnnnnnnnnnnnnnnnnnnnnnnnnnnnnnnnnnnnnnnnnnnnnnnnnnnnnnnnnnnnnnnnnnnnnnnnnnnnnnnnnnnnnnnnnnnnnnnnnnnnnnnnnnnnnnnnnnnnnnnnnnnnnnnnnnnnnnnnnnnnnnnnnnnnnnnnnnnnnnnnnnnnnnnnnnnnnnnnnnnnnnnnnnnnnnnnnnnnnnnnnnnnnnnnnnnnnnnnnnnnnnnnnnnnnnnnnnnnnnnnnnnnnnnnnnnnnnnnnnnnnnnnnnnnnnnnnnnnnnnnnnnnnnnnnnnnnnnnnnnnnnnnnnnnnnnnnnnnnnnnnnnnnnnnnnnnnnnnnnnnnnnnnnnnnnnnnnnnnnnnnnnnnnnnnnnnnnnnnnnnnnnnnnnnnnnnnnnnnnnnnnnnnnnnnnnnnnnnnnnnnnnnnnnnnnnnnnnnnnnnnnnnnnnnnnnnnnnnnnnnnnnnnnnnnnnnnnnnnnnnnnnnnnnnnnnnnnnnnnnnnnnnnnnnnnnnnnnnnnnnnnnnnnnnnnnnnnnnnnnnnnnnnnnnnnnnnnnnnnnnnnnnnnnnnnnnnnnnnnnnnnnnnnnnnnnnnnnnnnnnnnnnnnnnnnnnnnnnnnnnnnnnnnnnnnnnnnnnnnnnnnnnnnnnnnnnnnnnnnnnnnnnnnnnnnnnnnnnnnnnnnnnnnnnnnnnnnnnnnnnnnnnnnnnnnnnnnnnnnnnnnnnnnnnnnnnnnnnnnnnnnnnnnnnnnnnnnnnnnnnnnnnnnnnnnnnnnnnnnnnnnnnnnnnnnnnnnnnnnnnnnnnnnnnnnnnnnnnnnnnnnnnnnnnnnnnnnnnnnnnnnnnnnnnnnnnnnnnnnnnnnnnnnnnnnnnnnnnnnnnnnnnnnnnnnnnnnnnnnnnnnnnnnnnnnnnnnnnnnnnnnnnnnnnnnnnnnnnnnnnnnnnnnnnnnnnnnnnnnnnnnnnnnnnnnnnnnnnnnnnnnnnnnnnnnnnnnnnnnnnnnnnnnnnnnnnnnnnnnnnnnnnnnnnnnnnnnnnnnnnnnnnnnnnnnnnnnnnnnnnnnnnnnnnnnnnnnnnnnnnnnnnnnnnnnnnnnnnnnnnnnnnnnnnnnnnnnnnnnnnnnnnnnnnnnnnnnnnnnnnnnnnnnnnnnnnnnnnnnnnnnnnnnnnnnnnnnnnnnnnnnnnnnnnnnnnnnnnnnnnnnnnnnnnnnnnnnnnnnnnnnnnnnnnnnnnnnnnnnnnnnnnnnnnnnnnnnnnnnnnnnnnnnnnnnnnnnnnnnnnnnnnnnnnnnnnnnnnnnnnnnnnnnnnnnnnnnnnnnnnnnnnnnnnnnnnnnnnnnnnnnnnnnnnnnnnnnnnnnnnnnnnnnnnnnnnnnnnnnnnnnnnnnnnnnnnnnnnnnnnnnnnnnnnnnnnnnnnnnnnnnnnnnnnnnnnnnnnnnnnnnnnnnnnnnnnnnnnnnnnnnnnnnnnnnnnnnnnnnnnnnnnnnnnnnnnnnnnnnnnnnnnnnnnnnnnnnnnnnnnnnnnnnnnnnnnnnnnnnnnnnnnnnnnnnnnnnnnnnnnnnnnnnnnnnnnnnnnnnnnnnnnnnnnnnnnnnnnnnnnnnnnnnnnnnnnnnnnnnnnnnnnnnnnnnnnnnnnnnnnnnnnnnnnnnnnnnnnnnnnnnnnnnnnnnnnnnnnnnnnnnnnnnnnnnnnnnnnnnnnnnnnnnnnnnnnnnnnnnnnnnnnnnnnnnnnnnnnnnnnnnnnnnnnnnnnnnnnnnnnnnnnnnnnnnnnnnnnnnnnnnnnnnnnnnnnnnnnnnnnnnnnnnnnnnnnnnnnnnnnnnnnnnnnnnnnnnnnnnnnnnnnnnnnnnnnnnnnnnnnnnnnnnnnnnnnnnnnnnnnnnnnnnnnnnnnnnnnnnnnnnnnnnnnnnnnnnnnnnnnnnnnnnnnnnnnnnnnnnnnnnnnnnnnnnnnnnnnnnnnnnnnnnnnnnnnnnnnnnnnnnnnnnnnnnnnnnnnnnnnnnnnnnnnnnnnnnnnnnnnnnnnnnnnnnnnnnnnnnnnnnnnnnnnnnnnnnnnnnnnnnnnnnnnnnnnnnnnnnnnnnnnnnnnnnnnnnnnnnnnnnnnnnnnnnnnnnnnnnnnnnnnnnnnnnnnnnnnnnnnnnnnnnnnnnnnnnnnnnnnnnnnnnnnnnnnnnnnnnnnnnnnnnnnnnnnnnnnnnnnnnnnnnnnnnnnnnnnnnnnnnnnnnnnnnnnnnnnnnnnnnnnnnnnnnnnnnnnnnnnnnnnnnnnnnnnnnnnnnnnnnnnnnnnnnnnnnnnnnnnnnnnnnnnnnnnnnnnnnnnnnnnnnnnnnnnnnnnnnnnnnnnnnnnnnnnnnnnnnnnnnnnnnnnnnnnnnnnnnnnnnnnnnnnnnnnnnnnnnnnnnnnnnnnnnnnnnnnnnnnnnnnnnnnnnnnnnnnnnnnnnnnnnnnnnnnnnnnnnnnnnnnnnnnnnnnnnnnnnnnnnnnnnnnnnnnnnnnnnnnnnnnnnnnnnnnnnnnnnnnnnnnnnnnnnnnnnnnnnnnnnnnnnnnnnnnnnnnnnnnnnnnnnnnnnnnnnnnnnnnnnnnnnnnnnnnnnnnnnnnnnnnnnnnnnnnnnnnnnnnnnnnnnnnnnnnnnnnnnnnnnnnnnnnnnnnnnnnnnnnnnnnnnnnnnnnnnnnnnnnnnnnnnnnnnnnnnnnnnnnnnnnnnnnnnnnnnnnnnnnnnnnnnnnnnnnnnnnnnnnnnnnnnnnnnnnnnnnnnnnnnnnnnnnnnnnnnnnnnnnnnnnnnnnnnnnnnnnnnnnnnnnnnnnnnnnnnnnnnnnnnnnnnnnnnnnnnnnnnnnnnnnnnnnnnnnnnnnnnnnnnnnnnnnnnnnnnnnnnnnnnnnnnnnnnnnnnnnnnnnnnnnnnnnnnnnnnnnnnnnnnnnnnnnnnnnnnnnnnnnnnnnnnnnnnnnnnnnnnnnnnnnnnnnnnnnnnnnnnnnnnnnnnnnnnnnnnnnnnnnnnnnnnnnnnnnnnnnnnnnnnnnnnnnnnnnnnnnnnnnnnnnnnnnnnnnnnnnnnnnnnnnnnnnnnnnnnnnnnnnnnnnnnnnnnnnnnnnnnnnnnnnnnnnnnnnnnnnnnnnnnnnnnnnnnnnnnnnnnnnnnnnnnnnnnnnnnnnnnnnnnnnnnnnnnnnnnnnnnnnnnnnnnnnnnnnnnnnnnnnnnnnnnnnnnnnnnnnnnnnnnnnnnnnnnnnnnnnnnnnnnnnnnnnnnnnnnnnnnnnnnnnnnnnnnnnnnnnnnnnnnnnnnnnnnnnnnnnnnnnnnnnnnnnnnnnnnnnnnnnnnnnnnnnnnnnnnnnnnnnnnnnnnnnnnnnnnnnnnnnnnnnnnnnnnnnnnnnnnnnnnnnnnnnnnnnnnnnnnnnnnnnnnnnnnnnnnnnnnnnnnnnnnnnnnnnnnnnnnnnnnnnnnnnnnnnnnnnnnnnnnnnnnnnnnnnnnnnnnnnnnnnnnnnnnnnnnnnnnnnnnnnnnnnnnnnnnnnnnnnnnnnnnnnnnnnnnnnnnnnnnnnnnnnnnnnnnnnnnnnnnnnnnnnnnnnnnnnnnnnnnnnnnnnnnnnnnnnnnnnnnnnnnnnnnnnnnnnnnnnnnnnnnnnnnnnnnnnnnnnnnnnnnnnnnnnnnnnnnnnnnnnnnnnnnnnnnnnnnnnnnnnnnnnnnnnnnnnnnnnnnnnnnnnnnnnnnnnnnnnnnnnnnnnnnnnnnnnnnnnnnnnnnnnnnnnnnnnnnnnnnnnnnnnnnnnnnnnnnnnnnnnnnnnnnnnnnnnnnnnnnnnnnnnnnnnnnnnnnnnnnnnnnnnnnnnnnnnnnnnnnnnnnnnnnnnnnnnnnnnnnnnnnnnnnnnnnnnnnnnnnnnnnnnnnnnnnnnnnnnnnnnnnnnnnnnnnnnnnnnnnnnnnnnnnnnnnnnnnnnnnnnnnnnnnnnnnnnnnnnnnnnnnnnnnnnnnnnnnnnnnnnnnnnnnnnnnnnnnnnnnnnnnnnnnnnnnnnnnnnnnnnnnnnnnnnnnnnnnnnnnnnnnnnnnnnnnnnnnnnnnnnnnnnnnnnnnnnnnnnnnnnnnnnnnnnnnnnnnnnnnnnnnnnnnnnnnnnnnnnnnnnnnnnnnnnnnnnnnnnnnnnnnnnnnnnnnnnnnnnnnnnnnnnnnnnnnnnnnnnnnnnnnnnnnnnnnnnnnnnnnnnnnnnnnnnnnnnnnnnnnnnnnnnnnnnnnnnnnnnnnnnnnnnnnnnnnnnnnnnnnnnnnnnnnnnnnnnnnnnnnnnnnnnnnnnnnnnnnnnnnnnnnnnnnnnnnnnnnnnnnnnnnnnnnnnnnnnnnnnnnnnnnnnnnnnnnnnnnnnnnnnnnnnnnnnnnnnnnnnnnnnnnnnnnnnnnnnnnnnnnnnnnnnnnnnnnnnnnnnnnnnnnnnnnnnnnnnnnnnnnnnnnnnnnnnnnnnnnnnnnnnnnnnnnnnnnnnnnnnnnnnnnnnnnnnnnnnnnnnnnnnnnnnnnnnnnnnnnnnnnnnnnnnnnnnnnnnnnnnnnnnnnnnnnnnnnnnnnnnnnnnnnnnnnnnnnnnnnnnnnnnnnnnnnnnnnnnnnnnnnnnnnnnnnnnnnnnnnnnnnnnnnnnnnnnnnnnnnnnnnnnnnnnnnnnnnnnnnnnnnnnnnnnnnnnnnnnnnnnnnnnnnnnnnnnnnnnnnnnnnnnnnnnnnnnnnnnnnnnnnnnnnnnnnnnnnnnnnnnnnnnnnnnnnnnnnnnnnnnnnnnnnnnnnnnnnnnnnnnnnnnnnnnnnnnnnnnnnnnnnnnnnnnnnnnnnnnnnnnnnnnnnnnnnnnnnnnnnnnnnnnnnnnnnnnnnnnnnnnnnnnnnnnnnnnnnnnnnnnnnnnnnnnnnnnnnnnnnnnnnnnnnnnnnnnnnnnnnnnnnnnnnnnnnnnnnnnnnnnnnnnnnnnnnnnnnnnnnnnnnnnnnnnnnnnnnnnnnnnnnnnnnnnnnnnnnnnnnnnnnnnnnnnnnnnnnnnnnnnnnnnnnnnnnnnnnnnnnnnnnnnnnnnnnnnnnnnnnnnnnnnnnnnnnnnnnnnnnnnnnnnnnnnnnnnnnnnnnnnnnnnnnnnnnnnnnnnnnnnnnnnnnnnnnnnnnnnnnnnnnnnnnnnnnnnnnnnnnnnnnnnnnnnnnnnnnnnnnnnnnnnnnnnnnnnnnnnnnnnnnnnnnnnnnnnnnnnnnnnnnnnnnnnnnnnnnnnnnnnnnnnnnnnnnnnnnnnnnnnnnnnnnnnnnnnnnnnnnnnnnnnnnnnnnnnnnnnnnnnnnnnnnnnnnnnnnnnnnnnnnnnnnnnnnnnnnnnnnnnnnnnnnnnnnnnnnnnnnnnnnnnnnnnnnnnnnnnnnnnnnnnnnnnnnnnnnnnnnnnnnnnnnnnnnnnnnnnnnnnnnnnnnnnnnnnnnnnnnnnnnnnnnnnnnnnnnnnnnnnnnnnnnnnnnnnnnnnnnnnnnnnnnnnnnnnnnnnnnnnnnnnnnnnnnnnnnnnnnnnnnnnnnnnnnnnnnnnnnnnnnnnnnnnnnnnnnnnnnnnnnnnnnnnnnnnnnnnnnnnnnnnnnnnnnnnnnnnnnnnnnnnnnnnnnnnnnnnnnnnnnnnnnnnnnnnnnnnnnnnnnnnnnnnnnnnnnnnnnnnnnnnnnnnnnnnnnnnnnnnnnnnnnnnnnnnnnnnnnnnnnnnnnnnnnnnnnnnnnnnnnnnnnnnnnnnnnnnnnnnnnnnnnnnnnnnnnnnnnnnnnnnnnnnnnnnnnnnnnnnnnnnnnnnnnnnnnnnnnnnnnnnnnnnnnnnnnnnnnnnnnnnnnnnnnnnnnnnnnnnnnnnnnnnnnnnnnnnnnnnnnnnnnnnnnnnnnnnnnnnnnnnnnnnnnnnnnnnnnnnnnnnnnnnnnnnnnnnnnnnnnnnnnnnnnnnnnnnnnnnnnnnnnnnnnnnnnnnnnnnnnnnnnnnnnnnnnnnnnnnnnnnnnnnnnnnnnnnnnnnnnnnnnnnnnnnnnnnnnnnnnnnnnnnnnnnnnnnnnnnnnnnnnnnnnnnnnnnnnnnnnnnnnnnnnnnnnnnnnnnnnnnnnnnnnnnnnnnnnnnnnnnnnnnnnnnnnnnnnnnnnnnnnnnnnnnnnnnnnnnnnnnnnnnnnnnnnnnnnnnnnnnnnnnnnnnnnnnnnnnnnnnnnnnnnnnnnnnnnnnnnnnnnnnnnnnnnnnnnnnnnnnnnnnnnnnnnnnnnnnnnnnnnnnnnnnnnnnnnnnnnnnnnnnnnnnnnnnnnnnnnnnnnnnnnnnnnnnnnnnnnnnnnnnnnnnnnnnnnnnnnnnnnnnnnnnnnnnnnnnnnnnnnnnnnnnnnnnnnnnnnnnnnnnnnnnnnnnnnnnnnnnnnnnnnnnnnnnnnnnnnnnnnnnnnnnnnnnnnnnnnnnnnnnnnnnnnnnnnnnnnnnnnnnnnnnnnnnnnnnnnnnnnnnnnnnnnnnnnnnnnnnnnnnnnnnnnnnnnnnnnnnnnnnnnnnnnnnnnnnnnnnnnnnnnnnnnnnnnnnnnnnnnnnnnnnnnnnnnnnnnnnnnnnnnnnnnnnnnnnnnnnnnnnnnnnnnnnnnnnnnnnnnnnnnnnnnnnnnnnnnnnnnnnnnnnnnnnnnnnnnnnnnnnnnnnnnnnnnnnnnnnnnnnnnnnnnnnnnnnnnnnnnnnnnnnnnnnnnnnnnnnnnnnnnnnnnnnnnnnnnnnnnnnnnnnnnnnnnnnnnnnnnnnnnnnnnnnnnnnnnnnnnnnnnnnnnnnnnnnnnnnnnnnnnnnnnnnnnnnnnnnnnnnnnnnnnnnnnnnnnnnnnnnnnnnnnnnnnnnnnnnnnnnnnnnnnnnnnnnnnnnnnnnnnnnnnnnnnnnnnnnnnnnnnnnnnnnnnnnnnnnnnnnnnnnnnnnnnnnnnnnnnnnnnnnnnnnnnnnnnnnnnnnnnnnnnnnnnnnnnnnnnnnnnnnnnnnnnnnnnnnnnnnnnnnnnnnnnnnnnnnnnnnnnnnnnnnnnnnnnnnnnnnnnnnnnnnnnnnnnnnnnnnnnnnnnnnnnnnnnnnnnnnnnnnnnnnnnnnnnnnnnnnnnnnnnnnnnnnnnnnnnnnnnnnnnnnnnnnnnnnnnnnnnnnnnnnnnnnnnnnnnnnnnnnnnnnnnnnnnnnnnnnnnnnnnnnnnnnnnnnnnnnnnnnnnnnnnnnnnnnnnnnnnnnnnnnnnnnnnnnnnnnnnnnnnnnnnnnnnnnnnnnnnnnnnnnnnnnnnnnnnnnnnnnnnnnnnnnnnnnnnnnnnnnnnnnnnnnnnnnnnnnnnnnnnnnnnnnnnnnnnnnnnnnnnnnnnnnnnnnnnnnnnnnnnnnnnnnnnnnnnnnnnnnnnnnnnnnnnnnnnnnnnnnnnnnnnnnnnnnnnnnnnnnnnnnnnnnnnnnnnnnnnnnnnnnnnnnnnnnnnnnnnnnnnnnnnnnnnnnnnnnnnnnnnnnnnnnnnnnnnnnnnnnnnnnnnnnnnnnnnnnnnnnnnnnnnnnnnnnnnnnnnnnnnnnnnnnnnnnnnnnnnnnnnnnnnnnnnnnnnnnnnnnnnnnnnnnnnnnnnnnnnnnnnnnnnnnnnnnnnnnnnnnnnnnnnnnnnnnnnnnnnnnnnnnnnnnnnnnnnnnnnnnnnnnnnnnnnnnnnnnnnnnnnnnnnnnnnnnnnnnnnnnnnnnnnnnnnnnnnnnnnnnnnnnnnnnnnnnnnnnnnnnnnnnnnnnnnnnnnnnnnnnnnnnnnnnnnnnnnnnnnnnnnnnnnnnnnnnnnnnnnnnnnnnnnnnnnnnnnnnnnnnnnnnnnnnnnnnnnnnnnnnnnnnnnnnnnnnnnnnnnnnnnnnnnnnnnnnnnnnnnnnnnnnnnnnnnnnnnnnnnnnnnnnnnnnnnnnnnnnnnnnnnnnnnnnnnnnnnnnnnnnnnnnnnnnnnnnnnnnnnnnnnnnnnnnnnnnnnnnnnnnnnnnnnnnnnnnnnnnnnnnnnnnnnnnnnnnnnnnnnnnnnnnnnnnnnnnnnnnnnnnnnnnnnnnnnnnnnnnnnnnnnnnnnnnnnnnnnnnnnnnnnnnnnnnnnnnnnnnnnnnnnnnnnnnnnnnnnnnnnnnnnnnnnnnnnnnnnnnnnnnnnnnnnnnnnnnnnnnnnnnnnnnnnnnnnnnnnnnnnnnnnnnnnnnnnnnnnnnnnnnnnnnnnnnnnnnnnnnnnnnnnnnnnnnnnnnnnnnnnnnnnnnnnnnnnnnnnnnnnnnnnnnnnnnnnnnnnnnnnnnnnnnnnnnnnnnnnnnnnnnnnnnnnnnnnnnnnnnnnnnnnnnnnnnnnnnnnnnnnnnnnnnnnnnnnnnnnnnnnnnnnnnnnnnnnnnnnnnnnnnnnnnnnnnnnnnnnnnnnnnnnnnnnnnnnnnnnnnnnnnnnnnnnnnnnnnnnnnnnnnnnnnnnnnnnnnnnnnnnnnnnnnnnnnnnnnnnnnnnnnnnnnnnnnnnnnnnnnnnnnnnnnnnnnnnnnnnnnnnnnnnnnnnnnnnnnnnnnnnnnnnnnnnnnnnnnnnnnnnnnnnnnnnnnnnnnnnnnnnnnnnnnnnnnnnnnnnnnnnnnnnnnnnnnnnnnnnnnnnnnnnnnnnnnnnnnnnnnnnnnnnnnnnnnnnnnnnnnnnnnnnnnnnnnnnnnnnnnnnnnnnnnnnnnnnnnnnnnnnnnnnnnnnnnnnnnnnnnnnnnnnnnnnnnnnnnnnnnnnnnnnnnnnnnnnnnnnnnnnnnnnnnnnnnnnnnnnnnnnnnnnnnnnnnnnnnnnnnnnnnnnnnnnnnnnnnnnnnnnnnnnnnnnnnnnnnnnnnnnnnnnnnnnnnnnnnnnnnnnnnnnnnnnnnnnnnnnnnnnnnnnnnnnnnnnnnnnnnnnnnnnnnnnnnnnnnnnnnnnnnnnnnnnnnnnnnnnnnnnnnnnnnnnnnnnnnnnnnnnnnnnnnnnnnnnnnnnnnnnnnnnnnnnnnnnnnnnnnnnnnnnnnnnnnnnnnnnnnnnnnnnnnnnnnnnnnnnnnnnnnnnnnnnnnnnnnnnnnnnnnnnnnnnnnnnnnnnnnnnnnnnnnnnnnnnnnnnnnnnnnnnnnnnnnnnnnnnnnnnnnnnnnnnnnnnnnnnnnnnnnnnnnnnnnnnnnnnnnnnnnnnnnnnnnnnnnnnnnnnnnnnnnnnnnnnnnnnnnnnnnnnnnnnnnnnnnnnnnnnnnnnnnnnnnnnnnnnnnnnnnnnnnnnnnnnnnnnnnnnnnnnnnnnnnnnnnnnnnnnnnnnnnnnnnnnnnnnnnnnnnnnnnnnnnnnnnnnnnnnnnnnnnnnnnnnnnnnnnnnnnnnnnnnnnnnnnnnnnnnnnnnnnnnnnnnnnnnnnnnnnnnnnnnnnnnnnnnnnnnnnnnnnnnnnnnnnnnnnnnnnnnnnnnnnnnnnnnnnnnnnnnnnnnnnnnnnnnnnnnnnnnnnnnnnnnnnnnnnnnnnnnnnnnnnnnnnnnnnnnnnnnnnnnnnnnnnnnnnnnnnnnnnnnnnnnnnnnnnnnnnnnnnnnnnnnnnnnnnnnnnnnnnnnnnnnnnnnnnnnnnnnnnnnnnnnnnnnnnnnnnnnnnnnnnnnnnnnnnnnnnnnnnnnnnnnnnnnnnnnnnnnnnnnnnnnnnnnnnnnnnnnnnnnnnnnnnnnnnnnnnnnnnnnnnnnnnnnnnnnnnnnnnnnnnnnnnnnnnnnnnnnnnnnnnnnnnnnnnnnnnnnnnnnnnnnnnnnnnnnnnnnnnnnnnnnnnnnnnnnnnnnnnnnnnnnnnnnnnnnnnnnnnnnnnnnnnnnnnnnnnnnnnnnnnnnnnnnnnnnnnnnnnnnnnnnnnnnnnnnnnnnnnnnnnnnnnnnnnnnnnnnnnnnnnnnnnnnnnnnnnnnnnnnnnnnnnnnnnnnnnnnnnnnnnnnnnnnnnnnnnnnnnnnnnnnnnnnnnnnnnnnnnnnnnnnnnnnnnnnnnnnnnnnnnnnnnnnnnnnnnnnnnnnnnnnnnnnnnnnnnnnnnnnnnnnnnnnnnnnnnnnnnnnnnnnnnnnnnnnnnnnnnnnnnnnnnnnnnnnnnnnnnnnnnnnnnnnnnnnnnnnnnnnnnnnnnnnnnnnnnnnnnnnnnnnnnnnnnnnnnnnnnnnnnnnnnnnnnnnnnnnnnnnnnnnnnnnnnnnnnnnnnnnnnnnnnnnnnnnnnnnnnnnnnnnnnnnnnnnnnnnnnnnnnnnnnnnnnnnnnnnnnnnnnnnnnnnnnnnnnnnnnnnnnnnnnnnnnnnnnnnnnnnnnnnnnnnnnnnnnnnnnnnnnnnnnnnnnnnnnnnnnnnnnnnnnnnnnnnnnnnnnnnnnnnnnnnnnnnnnnnnnnnnnnnnnnnnnnnnnnnnnnnnnnnnnnnnnnnnnnnnnnnnnnnnnnnnnnnnnnnnnnnnnnnnnnnnnnnnnnnnnnnnnnnnnnnnnnnnnnnnnnnnnnnnnnnnnnnnnnnnnnnnnnnnnnnnnnnnnnnnnnnnnnnnnnnnnnnnnnnnnnnnnnnnnnnnnnnnnnnnnnnnnnnnnnnnnnnnnnnnnnnnnnnnnnnnnnnnnnnnnnnnnnnnnnnnnnnnnnnnnnnnnnnnnnnnnnnnnnnnnnnnnnnnnnnnnnnnnnnnnnnnnnnnnnnnnnnnnnnnnnnnnnnnnnnnnnnnnnnnnnnnnnnnnnnnnnnnnnnnnnnnnnnnnnnnnnnnnnnnnnnnnnnnnnnnnnnnnnnnnnnnnnnnnnnnnnnnnnnnnnnnnnnnnnnnnnnnnnnnnnnnnnnnnnnnnnnnnnnnnnnnnnnnnnnnnnnnnnnnnnnnnnnnnnnnnnnnnnnnnnnnnnnnnnnnnnnnnnnnnnnnnnnnnnnnnnnnnnnnnnnnnnnnnnnnnnnnnnnnnnnnnnnnnnnnnnnnnnnnnnnnnnnnnnnnnnnnnnnnnnnnnnnnnnnnnnnnnnnnnnnnnnnnnnnnnnnnnnnnnnnnnnnnnnnnnnnnnnnnnnnnnnnnnnnnnnnnnnnnnnnnnnnnnnnnnnnnnnnnnnnnnnnnnnnnnnnnnnnnnnnnnnnnnnnnnnnnnnnnnnnnnnnnnnnnnnnnnnnnnnnnnnnnnnnnnnnnnnnnnnnnnnnnnnnnnnnnnnnnnnnnnnnnnnnnnnnnnnnnnnnnnnnnnnnnnnnnnnnnnnnnnnnnnnnnnnnnnnnnnnnnnnnnnnnnnnnnnnnnnnnnnnnnnnnnnnnnnnnnnnnnnnnnnnnnnnnnnnnnnnnnnnnnnnnnnnnnnnnnnnnnnnnnnnnnnnnnnnnnnnnnnnnnnnnnnnnnnnnnnnnnnnnnnnnnnnnnnnnnnnnnnnnnnnnnnnnnnnnnnnnnnnnnnnnnnnnnnnnnnnnnnnnnnnnnnnnnnnnnnnnnnnnnnnnnnnnnnnnnnnnnnnnnnnnnnnnnnnnnnnnnnnnnnnnnnnnnnnnnnnnnnnnnnnnnnnnnnnnnnnnnnnnnnnnnnnnnnnnnnnnnnnnnnnnnnnnnnnnnnnnnnnnnnnnnnnnnnnnnnnnnnnnnnnnnnnnnnnnnnnnnnnnnnnnnnnnnnnnnnnnnnnnnnnnnnnnnnnnnnnnnnnnnnnnnnnnnnnnnnnnnnnnnnnnnnnnnnnnnnnnnnnnnnnnnnnnnnnnnnnnnnnnnnnnnnnnnnnnnnnnnnnnnnnnnnnnnnnnnnnnnnnnnnnnnnnnnnnnnnnnnnnnnnnnnnnnnnnnnnnnnnnnnnnnnnnnnnnnnnnnnnnnnnnnnnnnnnnnnnnnnnnnnnnnnnnnnnnnnnnnnnnnnnnnnnnnnnnnnnnnnnnnnnnnnnnnnnnnnnnnnnnnnnnnnnnnnnnnnnnnnnnnnnnnnnnnnnnnnnnnnnnnnnnnnnnnnnnnnnnnnnnnnnnnnnnnnnnnnnnnnnnnnnnnnnnnnnnnnnnnnnnnnnnnnnnnnnnnnnnnnnnnnnnnnnnnnnnnnnnnnnnnnnnnnnnnnnnnnnnnnnnnnnnnnnnnnnnnnnnnnnnnnnnnnnnnnnnnnnnnnnnnnnnnnnnnnnnnnnnnnnnnnnnnnnnnnnnnnnnnnnnnnnnnnnnnnnnnnnnnnnnnnnnnnnnnnnnnnnnnnnnnnnnnnnnnnnnnnnnnnnnnnnnnnnnnnnnnnnnnnnnnnnnnnnnnnnnnnnnnnnnnnnnnnnnnnnnnnnnnnnnnnnnnnnnnnnnnnnnnnnnnnnnnnnnnnnnnnnnnnnnnnnnnnnnnnnnnnnnnnnnnnnnnnnnnnnnnnnnnnnnnnnnnnnnnnnnnnnnnnnnnnnnnnnnnnnnnnnnnnnnnnnnnnnnnnnnnnnnnnnnnnnnnnnnnnnnnnnnnnnnnnnnnnnnnnnnnnnnnnnnnnnnnnnnnnnnnnnnnnnnnnnnnnnnnnnnnnnnnnnnnnnnnnnnnnnnnnnnnnnnnnnnnnnnnnnnnnnnnnnnnnnnnnnnnnnnnnnnnnnnnnnnnnnnnnnnnnnnnnnnnnnnnnnnnnnnnnnnnnnnnnnnnnnnnnnnnnnnnnnnnnnnnnnnnnnnnnnnnnnnnnnnnnnnnnnnnnnnnnnnnnnnnnnnnnnnnnnnnnnnnnnnnnnnnnnnnnnnnnnnnnnnnnnnnnnnnnnnnnnnnnnnnnnnnnnnnnnnnnnnnnnnnnnnnnnnnnnnnnnnnnnnnnnnnnnnnnnnnnnnnnnnnnnnnnnnnnnnnnnnnnnnnnnnnnnnnnnnnnnnnnnnnnnnnnnnnnnnnnnnnnnnnnnnnnnnnnnnnnnnnnnnnnnnnnnnnnnnnnnnnnnnnnnnnnnnnnnnnnnnnnnnnnnnnnnnnnnnnnnnnnnnnnnnnnnnnnnnnnnnnnnnnnnnnnnnnnnnnnnnnnnnnnnnnnnnnnnnnnnnnnnnnnnnnnnnnnnnnnnnnnnnnnnnnnnnnnnnnnnnnnnnnnnnnnnnnnnnnnnnnnnnnnnnnnnnnnnnnnnnnnnnnnnnnnnnnnnnnnnnnnnnnnnnnnnnnnnnnnnnnnnnnnnnnnnnnnnnnnnnnnnnnnnnnnnnnnnnnnnnnnnnnnnnnnnnnnnnnnnnnnnnnnnnnnnnnnnnnnnnnnnnnnnnnnnnnnnnnnnnnnnnnnnnnnnnnnnnnnnnnnnnnnnnnnnnnnnnnnnnnnnnnnnnnnnnnnnnnnnnnnnnnnnnnnnnnnnnnnnnnnnnnnnnnnnnnnnnnnnnnnnnnnnnnnnnnnnnnnnnnnnnnnnnnnnnnnnnnnnnnnnnnnnnnnnnnnnnnnnnnnnnnnnnnnnnnnnnnnnnnnnnnnnnnnnnnnnnnnnnnnnnnnnnnnnnnnnnnnnnnnnnnnnnnnnnnnnnnnnnnnnnnnnnnnnnnnnnnnnnnnnnnnnnnnnnnnnnnnnnnnnnnnnnnnnnnnnnnnnnnnnnnnnnnnnnnnnnnnnnnnnnnnnnnnnnnnnnnnnnnnnnnnnnnnnnnnnnnnnnnnnnnnnnnnnnnnnnnnnnnnnnnnnnnnnnnnnnnnnnnnnnnnnnnnnnnnnnnnnnnnnnnnnnnnnnnnnnnnnnnnnnnnnnnnnnnnnnnnnnnnnnnnnnnnnnnnnnnnnnnnnnnnnnnnnnnnnnnnnnnnnnnnnnnnnnnnnnnnnnnnnnnnnnnnnnnnnnnnnnnnnnnnnnnnnnnnnnnnnnnnnnnnnnnnnnnnnnnnnnnnnnnnnnnnnnnnnnnnnnnnnnnnnnnnnnnnnnnnnnnnnnnnnnnnnnnnnnnnnnnnnnnnnnnnnnnnnnnnnnnnnnnnnnnnnnnnnnnnnnnnnnnnnnnnnnnnnnnnnnnnnnnnnnnnnnnnnnnnnnnnnnnnnnnnnnnnnnnnnnnnnnnnnnnnnnnnnnnnnnnnnnnnnnnnnnnnnnnnnnnnnnnnnnnnnnnnnnnnnnnnnnnnnnnnnnnnnnnnnnnnnnnnnnnnnnnnnnnnnnnnnnnnnnnnnnnnnnnnnnnnnnnnnnnnnnnnnnnnnnnnnnnnnnnnnnnnnnnnnnnnnnnnnnnnnnnnnnnnnnnnnnnnnnnnnnnnnnnnnnnnnnnnnnnnnnnnnnnnnnnnnnnnnnnnnnnnnnnnnnnnnnnnnnnnnnnnnnnnnnnnnnnnnnnnnnnnnnnnnnnnnnnnnnnnnnnnnnnnnnnnnnnnnnnnnnnnnnnnnnnnnnnnnnnnnnnnnnnnnnnnnnnnnnnnnnnnnnnnnnnnnnnnnnnnnnnnnnnnnnnnnnnnnnnnnnnnnnnnnnnnnnnnnnnnnnnnnnnnnnnnnnnnnnnnnnnnnnnnnnnnnnnnnnnnnnnnnnnnnnnnnnnnnnnnnnnnnnnnnnnnnnnnnnnnnnnnnnnnnnnnnnnnnnnnnnnnnnnnnnnnnnnnnnnnnnnnnnnnnnnnnnnnnnnnnnnnnnnnnnnnnnnnnnnnnnnnnnnnnnnnnnnnnnnnnnnnnnnnnnnnnnnnnnnnnnnnnnnnnnnnnnnnnnnnnnnnnnnnnnnnnnnnnnnnnnnnnnnnnnnnnnnnnnnnnnnnnnnnnnnnnnnnnnnnnnnnnnnnnnnnnnnnnnnnnnnnnnnnnnnnnnnnnnnnnnnnnnnnnnnnnnnnnnnnnnnnnnnnnnnnnnnnnnnnnnnnnnnnnnnnnnnnnnnnnnnnnnnnnnnnnnnnnnnnnnnnnnnnnnnnnnnnnnnnnnnnnnnnnnnnnnnnnnnnnnnnnnnnnnnnnnnnnnnnnnnnnnnnnnnnnnnnnnnnnnnnnnnnnnnnnnnnnnnnnnnnnnnnnnnnnnnnnnnnnnnnnnnnnnnnnnnnnnnnnnnnnnnnnnnnnnnnnnnnnnnnnnnnnnnnnnnnnnnnnnnnnnnnnnnnnnnnnnnnnnnnnnnnnnnnnnnnnnnnnnnnnnnnnnnnnnnnnnnnnnnnnnnnnnnnnnnnnnnnnnnnnnnnnnnnnnnnnnnnnnnnnnnnnnnnnnnnnnnnnnnnnnnnnnnnnnnnnnnnnnnnnnnnnnnnnnnnnnnnnnnnnnnnnnnnnnnnnnnnnnnnnnnnnnnnnnnnnnnnnnnnnnnnnnnnnnnnnnnnnnnnnnnnnnnnnnnnnnnnnnnnnnnnnnnnnnnnnnnnnnnnnnnnnnnnnnnnnnnnnnnnnnnnnnnnnnnnnnnnnnnnnnnnnnnnnnnnnnnnnnnnnnnnnnnnnnnnnnnnnnnnnnnnnnnnnnnnnnnnnnnnnnnnnnnnnnnnnnnnnnnnnnnnnnnnnnnnnnnnnnnnnnnnnnnnnnnnnnnnnnnnnnnnnnnnnnnnnnnnnnnnnnnnnnnnnnnnnnnnnnnnnnnnnnnnnnnnnnnnnnnnnnnnnnnnnnnnnnnnnnnnnnnnnnnnnnnnnnnnnnnnnnnnnnnnnnnnnnnnnnnnnnnnnnnnnnnnnnnnnnnnnnnnnnnnnnnnnnnnnnnnnnnnnnnnnnnnnnnnnnnnnnnnnnnnnnnnnnnnnnnnnnnnnnnnnnnnnnnnnnnnnnnnnnnnnnnnnnnnnnnnnnnnnnnnnnnnnnnnnnnnnnnnnnnnnnnnnnnnnnnnnnnnnnnnnnnnnnnnnnnnnnnnnnnnnnnnnnnnnnnnnnnnnnnnnnnnnnnnnnnnnnnnnnnnnnnnnnnnnnnnnnnnnnnnnnnnnnnnnnnnnnnnnnnnnnnnnnnnnnnnnnnnnnnnnnnnnnnnnnnnnnnnnnnnnnnnnnnnnnnnnnnnnnnnnnnnnnnnnnnnnnnnnnnnnnnnnnnnnnnnnnnnnnnnnnnnnnnnnnnnnnnnnnnnnnnnnnnnnnnnnnnnnnnnnnnnnnnnnnnnnnnnnnnnnnnnnnnnnnnnnnnnnnnnnnnnnnnnnnnnnnnnnnnnnnnnnnnnnnnnnnnnnnnnnnnnnnnnnnnnnnnnnnnnnnnnnnnnnnnnnnnnnnnnnnnnnnnnnnnnnnnnnnnnnnnnnnnnnnnnnnnnnnnnnnnnnnnnnnnnnnnnnnnnnnnnnnnnnnnnnnnnnnnnnnnnnnnnnnnnnnnnnnnnnnnnnnnnnnnnnnnnnnnnnnnnnnnnnnnnnnnnnnnnnnnnnnnnnnnnnnnnnnnnnnnnnnnnnnnnnnnnnnnnnnnnnnnnnnnnnnnnnnnnnnnnnnnnnnnnnnnnnnnnnnnnnnnnnnnnnnnnnnnnnnnnnnnnnnnnnnnnnnnnnnnnnnnnnnnnnnnnnnnnnnnnnnnnnnnnnnnnnnnnnnnnnnnnnnnnnnnnnnnnnnnnnnnnnnnnnnnnnnnnnnnnnnnnnnnnnnnnnnnnnnnnnnnnnnnnnnnnnnnnnnnnnnnnnnnnnnnnnnnnnnnnnnnnnnnnnnnnnnnnnnnnnnnnnnnnnnnnnnnnnnnnnnnnnnnnnnnnnnnnnnnnnnnnnnnnnnnnnnnnnnnnnnnnnnnnnnnnnnnnnnnnnnnnnnnnnnnnnnnnnnnnnnnnnnnnnnnnnnnnnnnnnnnnnnnnnnnnnnnnnnnnnnnnnnnnnnnnnnnnnnnnnnnnnnnnnnnnnnnnnnnnnnnnnnnnnnnnnnnnnnnnnnnnnnnnnnnnnnnnnnnnnnnnnnnnnnnnnnnnnnnnnnnnnnnnnnnnnnnnnnnnnnnnnnnnnnnnnnnnnnnnnnnnnnnnnnnnnnnnnnnnnnnnnnnnnnnnnnnnnnnnnnnnnnnnnnnnnnnnnnnnnnnnnnnnnnnnnnnnnnnnnnnnnnnnnnnnnnnnnnnnnnnnnnnnnnnnnnnnnnnnnnnnnnnnnnnnnnnnnnnnnnnnnnnnnnnnnnnnnnnnnnnnnnnnnnnnnnnnnnnnnnnnnnnnnnnnnnnnnnnnnnnnnnnnnnnnnnnnnnnnnnnnnnnnnnnnnnnnnnnnnnnnnnnnnnnnnnnnnnnnnnnnnnnnnnnnnnnnnnnnnnnnnnnnnnnnnnnnnnnnnnnnnnnnnnnnnnnnnnnnnnnnnnnnnnnnnnnnnnnnnnnnnnnnnnnnnnnnnnnnnnnnnnnnnnnnnnnnnnnnnnnnnnnnnnnnnnnnnnnnnnnnnnnnnnnnnnnnnnnnnnnnnnnnnnnnnnnnnnnnnnnnnnnnnnnnnnnnnnnnnnnnnnnnnnnnnnnnnnnnnnnnnnnnnnnnnnnnnnnnnnnnnnnnnnnnnnnnnnnnnnnnnnnnnnnnnnnnnnnnnnnnnnnnnnnnnnnnnnnnnnnnnnnnnnnnnnnnnnnnnnnnnnnnnnnnnnnnnnnnnnnnnnnnnnnnnnnnnnnnnnnnnnnnnnnnnnnnnnnnnnnnnnnnnnnnnnnnnnnnnnnnnnnnnnnnnnnnnnnnnnnnnnnnnnnnnnnnnnnnnnnnnnnnnnnnnnnnnnnnnnnnnnnnnnnnnnnnnnnnnnnnnnnnnnnnnnnnnnnnnnnnnnnnnnnnnnnnnnnnnnnnnnnnnnnnnnnnnnnnnnnnnnnnnnnnnnnnnnnnnnnnnnnnnnnnnnnnnnnnnnnnnnnnnnnnnnnnnnnnnnnnnnnnnnnnnnnnnnnnnnnnnnnnnnnnnnnnnnnnnnnnnnnnnnnnnnnnnnnnnnnnnnnnnnnnnnnnnnnnnnnnnnnnnnnnnnnnnnnnnnnnnnnnnnnnnnnnnnnnnnnnnnnnnnnnnnnnnnnnnnnnnnnnnnnnnnnnnnnnnnnnnnnnnnnnnnnnnnnnnnnnnnnnnnnnnnnnnnnnnnnnnnnnnnnnnnnnnnnnnnnnnnnnnnnnnnnnnnnnnnnnnnnnnnnnnnnnnnnnnnnnnnnnnnnnnnnnnnnnnnnnnnnnnnnnnnnnnnnnnnnnnnnnnnnnnnnnnnnnnnnnnnnnnnnnnnnnnnnnnnnnnnnnnnnnnnnnnnnnnnnnnnnnnnnnnnnnnnnnnnnnnnnnnnnnnnnnnnnnnnnnnnnnnnnnnnnnnnnnnnnnnnnnnnnnnnnnnnnnnnnnnnnnnnnnnnnnnnnnnnnnnnnnnnnnnnnnnnnnnnnnnnnnnnnnnnnnnnnnnnnnnnnnnnnnnnnnnnnnnnnnnnnnnnnnnnnnnnnnnnnnnnnnnnnnnnnnnnnnnnnnnnnnnnnnnnnnnnnnnnnnnnnnnnnnnnnnnnnnnnnnnnnnnnnnnnnnnnnnnnnnnnnnnnnnnnnnnnnnnnnnnnnnnnnnnnnnnnnnnnnnnnnnnnnnnnnnnnnnnnnnnnnnnnnnnnnnnnnnnnnnnnnnnnnnnnnnnnnnnnnnnnnnnnnnnnnnnnnnnnnnnnnnnnnnnnnnnnnnnnnnnnnnnnnnnnnnnnnnnnnnnnnnnnnnnnnnnnnnnnnnnnnnnnnnnnnnnnnnnnnnnnnnnnnnnnnnnnnnnnnnnnnnnnnnnnnnnnnnnnnnnnnnnnnnnnnnnnnnnnnnnnnnnnnnnnnnnnnnnnnnnnnnnnnnnnnnnnnnnnnnnnnnnnnnnnnnnnnnnnnnnnnnnnnnnnnnnnnnnnnnnnnnnnnnnnnnnnnnnnnnnnnnnnnnnnnnnnnnnnnnnnnnnnnnnnnnnnnnnnnnnnnnnnnnnnnnnnnnnnnnnnnnnnnnnnnnnnnnnnnnnnnnnnnnnnnnnnnnnnnnnnnnnnnnnnnnnnnnnnnnnnnnnnnnnnnnnnnnnnnnnnnnnnnnnnnnnnnnnnnnnnnnnnnnnnnnnnnnnnnnnnnnnnnnnnnnnnnnnnnnnnnnnnnnnnnnnnnnnnnnnnnnnnnnnnnnnnnnnnnnnnnnnnnnnnnnnnnnnnnnnnnnnnnnnnnnnnnnnnnnnnnnnnnnnnnnnnnnnnnnnnnnnnnnnnnnnnnnnnnnnnnnnnnnnnnnnnnnnnnnnnnnnnnnnnnnnnnnnnnnnnnnnnnnnnnnnnnnnnnnnnnnnnnnnnnnnnnnnnnnnnnnnnnnnnnnnnnnnnnnnnnnnnnnnnnnnnnnnnnnnnnnnnnnnnnnnnnnnnnnnnnnnnnnnnnnnnnnnnnnnnnnnnnnnnnnnnnnnnnnnnnnnnnnnnnnnnnnnnnnnnnnnnnnnnnnnnnnnnnnnnnnnnnnnnnnnnnnnnnnnnnnnnnnnnnnnnnnnnnnnnnnnnnnnnnnnnnnnnnnnnnnnnnnnnnnnnnnnnnnnnnnnnnnnnnnnnnnnnnnnnnnnnnnnnnnnnnnnnnnnnnnnnnnnnnnnnnnnnnnnnnnnnnnnnnnnnnnnnnnnnnnnnnnnnnnnnnnnnnnnnnnnnnnnnnnnnnnnnnnnnnnnnnnnnnnnnnnnnnnnnnnnnnnnnnnnnnnnnnnnnnnnnnnnnnnnnnnnnnnnnnnnnnnnnnnnnnnnnnnnnnnnnnnnnnnnnnnnnnnnnnnnnnnnnnnnnnnnnnnnnnnnnnnnnnnnnnnnnnnnnnnnnnnnnnnnnnnnnnnnnnnnnnnnnnnnnnnnnnnnnnnnnnnnnnnnnnnnnnnnnnnnnnnnnnnnnnnnnnnnnnnnnnnnnnnnnnnnnnnnnnnnnnnnnnnnnnnnnnnnnnnnnnnnnnnnnnnnnnnnnnnnnnnnnnnnnnnnnnnnnnnnnnnnnnnnnnnnnnnnnnnnnnnnnnnnnnnnnnnnnnnnnnnnnnnnnnnnnnnnnnnnnnnnnnnnnnnnnnnnnnnnnnnnnnnnnnnnnnnnnnnnnnnnnnnnnnnnnnnnnnnnnnnnnnnnnnnnnnnnnnnnnnnnnnnnnnnnnnnnnnnnnnnnnnnnnnnnnnnnnnnnnnnnnnnnnnnnnnnnnnnnnnnnnnnnnnnnnnnnnnnnnnnnnnnnnnnnnnnnnnnnnnnnnnnnnnnnnnnnnnnnnnnnnnnnnnnnnnnnnnnnnnnnnnnnnnnnnnnnnnnnnnnnnnnnnnnnnnnnnnnnnnnnnnnnnnnnnnnnnnnnnnnnnnnnnnnnnnnnnnnnnnnnnnnnnnnnnnnnnnnnnnnnnnnnnnnnnnnnnnnnnnnnnnnnnnnnnnnnnnnnnnnnnnnnnnnnnnnnnnnnnnnnnnnnnnnnnnnnnnnnnnnnnnnnnnnnnnnnnnnnnnnnnnnnnnnnnnnnnnnnnnnnnnnnnnnnnnnnnnnnnnnnnnnnnnnnnnnnnnnnnnnnnnnnnnnnnnnnnnnnnnnnnnnnnnnnnnnnnnnnnnnnnnnnnnnnnnnnnnnnnnnnnnnnnnnnnnnnnnnnnnnnnnnnnnnnnnnnnnnnnnnnnnnnnnnnnnnnnnnnnnnnnnnnnnnnnnnnnnnnnnnnnnnnnnnnnnnnnnnnnnnnnnnnnnnnnnnnnnnnnnnnnnnnnnnnnnnnnnnnnnnnnnnnnnnnnnnnnnnnnnnnnnnnnnnnnnnnnnnnnnnnnnnnnnnnnnnnnnnnnnnnnnnnnnnnnnnnnnnnnnnnnnnnnnnnnnnnnnnnnnnnnnnnnnnnnnnnnnnnnnnnnnnnnnnnnnnnnnnnnnnnnnnnnnnnnnnnnnnnnnnnnnnnnnnnnnnnnnnnnnnnnnnnnnnnnnnnnnnnnnnnnnnnnnnnnnnnnnnnnnnnnnnnnnnnnnnnnnnnnnnnnnnnnnnnnnnnnnnnnnnnnnnnnnnnnnnnnnnnnnnnnnnnnnnnnnnnnnnnnnnnnnnnnnnnnnnnnnnnnnnnnnnnnnnnnnnnnnnnnnnnnnnnnnnnnnnnnnnnnnnnnnnnnnnnnnnnnnnnnnnnnnnnnnnnnnnnnnnnnnnnnnnnnnnnnnnnnnnnnnnnnnnnnnnnnnnnnnnnnnnnnnnnnnnnnnnnnnnnnnnnnnnnnnnnnnnnnnnnnnnnnnnnnnnnnnnnnnnnnnnnnnnnnnnnnnnnnnnnnnnnnnnnnnnnnnnnnnnnnnnnnnnnnnnnnnnnnnnnnnnnnnnnnnnnnnnnnnnnnnnnnnnnnnnnnnnnnnnnnnnnnnnnnnnnnnnnnnnnnnnnnnnnnnnnnnnnnnnnnnnnnnnnnnnnnnnnnnnnnnnnnnnnnnnnnnnnnnnnnnnnnnnnnnnnnnnnnnnnnnnnnnnnnnnnnnnnnnnnnnnnnnnnnnnnnnnnnnnnnnnnnnnnnnnnnnnnnnnnnnnnnnnnnnnnnnnnnnnnnnnnnnnnnnnnnnnnnnnnnnnnnnnnnnnnnnnnnnnnnnnnnnnnnnnnnnnnnnnnnnnnnnnnnnnnnnnnnnnnnnnnnnnnnnnnnnnnnnnnnnnnnnnnnnnnnnnnnnnnnnnnnnnnnnnnnnnnnnnnnnnnnnnnnnnnnnnnnnnnnnnnnnnnnnnnnnnnnnnnnnnnnnnnnnnnnnnnnnnnnnnnnnnnnnnnnnnnnnnnnnnnnnnnnnnnnnnnnnnnnnnnnnnnnnnnnnnnnnnnnnnnnnnnnnnnnnnnnnnnnnnnnnnnnnnnnnnnnnnnnnnnnnnnnnnnnnnnnnnnnnnnnnnnnnnnnnnnnnnnnnnnnnnnnnnnnnnnnnnnnnnnnnnnnnnnnnnnnnnnnnnnnnnnnnnnnnnnnnnnnnnnnnnnnnnnnnnnnnnnnnnnnnnnnnnnnnnnnnnnnnnnnnnnnnnnnnnnnnnnnnnnnnnnnnnnnnnnnnnnnnnnnnnnnnnnnnnnnnnnnnnnnnnnnnnnnnnnnnnnnnnnnnnnnnnnnnnnnnnnnnnnnnnnnnnnnnnnnnnnnnnnnnnnnnnnnnnnnnnnnnnnnnnnnnnnnnnnnnnnnnnnnnnnnnnnnnnnnnnnnnnnnnnnnnnnnnnnnnnnnnnnnnnnnnnnnnnnnnnnnnnnnnnnnnnnnnnnnnnnnnnnnnnnnnnnnnnnnnnnnnnnnnnnnnnnnnnnnnnnnnnnnnnnnnnnnnnnnnnnnnnnnnnnnnnnnnnnnnnnnnnnnnnnnnnnnnnnnnnnnnnnnnnnnnnnnnnnnnnnnnnnnnnnnnnnnnnnnnnnnnnnnnnnnnnnnnnnnnnnnnnnnnnnnnnnnnnnnnnnnnnnnnnnnnnnnnnnnnnnnnnnnnnnnnnnnnnnnnnnnnnnnnnnnnnnnnnnnnnnnnnnnnnnnnnnnnnnnnnnnnnnnnnnnnnnnnnnnnnnnnnnnnnnnnnnnnnnnnnnnnnnnnnnnnnnnnnnnnnnnnnnnnnnnnnnnnnnnnnnnnnnnnnnnnnnnnnnnnnnnnnnnnnnnnnnnnnnnnnnnnnnnnnnnnnnnnnnnnnnnnnnnnnnnnnnnnnnnnnnnnnnnnnnnnnnnnnnnnnnnnnnnnnnnnnnnnnnnnnnnnnnnnnnnnnnnnnnnnnnnnnnnnnnnnnnnnnnnnnnnnnnnnnnnnnnnnnnnnnnnnnnnnnnnnnnnnnnnnnnnnnnnnnnnnnnnnnnnnnnnnnnnnnnnnnnnnnnnnnnnnnnnnnnnnnnnnnnnnnnnnnnnnnnnnnnnnnnnnnnnnnnnnnnnnnnnnnnnnnnnnnnnnnnnnnnnnnnnnnnnnnnnnnnnnnnnnnnnnnnnnnnnnnnnnnnnnnnnnnnnnnnnnnnnnnnnnnnnnnnnnnnnnnnnnnnnnnnnnnnnnnnnnnnnnnnnnnnnnnnnnnnnnnnnnnnnnnnnnnnnnnnnnnnnnnnnnnnnnnnnnnnnnnnnnnnnnnnnnnnnnnnnnnnnnnnnnnnnnnnnnnnnnnnnnnnnnnnnnnnnnnnnnnnnnnnnnnnnnnnnnnnnnnnnnnnnnnnnnnnnnnnnnnnnnnnnnnnnnnnnnnnnnnnnnnnnnnnnnnnnnnnnnnnnnnnnnnnnnnnnnnnnnnnnnnnnnnnnnnnnnnnnnnnnnnnnnnnnnnnnnnnnnnnnnnnnnnnnnnnnnnnnnnnnnnnnnnnnnnnnnnnnnnnnnnnnnnnnnnnnnnnnnnnnnnnnnnnnnnnnnnnnnnnnnnnnnnnnnnnnnnnnnnnnnnnnnnnnnnnnnnnnnnnnnnnnnnnnnnnnnnnnnnnnnnnnnnnnnnnnnnnnnnnnnnnnnnnnnnnnnnnnnnnnnnnnnnnnnnnnnnnnnnnnnnnnnnnnnnnnnnnnnnnnnnnnnnnnnnnnnnnnnnnnnnnnnnnnnnnnnnnnnnnnnnnnnnnnnnnnnnnnnnnnnnnnnnnnnnnnnnnnnnnnnnnnnnnnnnnnnnnnnnnnnnnnnnnnnnnnnnnnnnnnnnnnnnnnnnnnnnnnnnnnnnnnnnnnnnnnnnnnnnnnnnnnnnnnnnnnnnnnnnnnnnnnnnnnnnnnnnnnnnnnnnnnnnnnnnnnnnnnnnnnnnnnnnnnnnnnnnnnnnnnnnnnnnnnnnnnnnnnnnnnnnnnnnnnnnnnnnnnnnnnnnnnnnnnnnnnnnnnnnnnnnnnnnnnnnnnnnnnnnnnnnnnnnnnnnnnnnnnnnnnnnnnnnnnnnnnnnnnnnnnnnnnnnnnnnnnnnnnnnnnnnnnnnnnnnnnnnnnnnnnnnnnnnnnnnnnnnnnnnnnnnnnnnnnnnnnnnnnnnnnnnnnnnnnnnnnnnnnnnnnnnnnnnnnnnnnnnnnnnnnnnnnnnnnnnnnnnnnnnnnnnnnnnnnnnnnnnnnnnnnnnnnnnnnnnnnnnnnnnnnnnnnnnnnnnnnnnnnnnnnnnnnnnnnnnnnnnnnnnnnnnnnnnnnnnnnnnnnnnnnnnnnnnnnnnnnnnnnnnnnnnnnnnnnnnnnnnnnnnnnnnnnnnnnnnnnnnnnnnnnnnnnnnnnnnnnnnnnnnnnnnnnnnnnnnnnnnnnnnnnnnnnnnnnnnnnnnnnnnnnnnnnnnnnnnnnnnnnnnnnnnnnnnnnnnnnnnnnnnnnnnnnnnnnnnnnnnnnnnnnnnnnnnnnnnnnnnnnnnnnnnnnnnnnnnnnnnnnnnnnnnnnnnnnnnnnnnnnnnnnnnnnnnnnnnnnnnnnnnnnnnnnnnnnnnnnnnnnnnnnnnnnnnnnnnnnnnnnnnnnnnnnnnnnnnnnnnnnnnnnnnnnnnnnnnnnnnnnnnnnnnnnnnnnnnnnnnnnnnnnnnnnnnnnnnnnnnnnnnnnnnnnnnnnnnnnnnnnnnnnnnnnnnnnnnnnnnnnnnnnnnnnnnnnnnnnnnnnnnnnnnnnnnnnnnnnnnnnnnnnnnnnnnnnnnnnnnnnnnnnnnnnnnnnnnnnnnnnnnnnnnnnnnnnnnnnnnnnnnnnnnnnnnnnnnnnnnnnnnnnnnnnnnnnnnnnnnnnnnnnnnnnnnnnnnnnnnnnnnnnnnnnnnnnnnnnnnnnnnnnnnnnnnnnnnnnnnnnnnnnnnnnnnnnnnnnnnnnnnnnnnnnnnnnnnnnnnnnnnnnnnnnnnnnnnnnnnnnnnnnnnnnnnnnnnnnnnnnnnnnnnnnnnnnnnnnnnnnnnnnnnnnnnnnnnnnnnnnnnnnnnnnnnnnnnnnnnnnnnnnnnnnnnnnnnnnnnnnnnnnnnnnnnnnnnnnnnnnnnnnnnnnnnnnnnnnnnnnnnnnnnnnnnnnnnnnnnnnnnnnnnnnnnnnnnnnnnnnnnnnnnnnnnnnnnnnnnnnnnnnnnnnnnnnnnnnnnnnnnnnnnnnnnnnnnnnnnnnnnnnnnnnnnnnnnnnnnnnnnnnnnnnnnnnnnnnnnnnnnnnnnnnnnnnnnnnnnnnnnnnnnnnnnnnnnnnnnnnnnnnnnnnnnnnnnnnnnnnnnnnnnnnnnnnnnnnnnnnnnnnnnnnnnnnnnnnnnnnnnnnnnnnnnnnnnnnnnnnnnnnnnnnnnnnnnnnnnnnnnnnnnnnnnnnnnnnnnnnnnnnnnnnnnnnnnnnnnnnnnnnnnnnnnnnnnnnnnnnnnnnnnnnnnnnnnnnnnnnnnnnnnnnnnnnnnnnnnnnnnnnnnnnnnnnnnnnnnnnnnnnnnnnnnnnnnnnnnnnnnnnnnnnnnnnnnnnnnnnnnnnnnnnnnnnnnnnnnnnnnnnnnnnnnnnnnnnnnnnnnnnnnnnnnnnnnnnnnnnnnnnnnnnnnnnnnnnnnnnnnnnnnnnnnnnnnnnnnnnnnnnnnnnnnnnnnnnnnnnnnnnnnnnnnnnnnnnnnnnnnnnnnnnnnnnnnnnnnnnnnnnnnnnnnnnnnnnnnnnnnnnnnnnnnnnnnnnnnnnnnnnnnnnnnnnnnnnnnnnnnnnnnnnnnnnnnnnnnnnnnnnnnnnnnnnnnnnnnnnnnnnnnnnnnnnnnnnnnnnnnnnnnnnnnnnnnnnnnnnnnnnnnnnnnnnnnnnnnnnnnnnnnnnnnnnnnnnnnnnnnnnnnnnnnnnnnnnnnnnnnnnnnnnnnnnnnnnnnnnnnnnnnnnnnnnnnnnnnnnnnnnnnnnnnnnnnnnnnnnnnnnnnnnnnnnnnnnnnnnnnnnnnnnnnnnnnnnnnnnnnnnnnnnnnnnnnnnnnnnnnnnnnnnnnnnnnnnnnnnnnnnnnnnnnnnnnnnnnnnnnnnnnnnnnnnnnnnnnnnnnnnnnnnnnnnnnnnnnnnnnnnnnnnnnnnnnnnnnnnnnnnnnnnnnnnnnnnnnnnnnnnnnnnnnnnnnnnnnnnnnnnnnnnnnnnnnnnnnnnnnnnnnnnnnnnnnnnnnnnnnnnnnnnnnnnnnnnnnnnnnnnnnnnnnnnnnnnnnnnnnnnnnnnnnnnnnnnnnnnnnnnnnnnnnnnnnnnnnnnnnnnnnnnnnnnnnnnnnnnnnnnnnnnnnnnnnnnnnnnnnnnnnnnnnnnnnnnnnnnnnnnnnnnnnnnnnnnnnnnnnnnnnnnnnnnnnnnnnnnnnnnnnnnnnnnnnnnnnnnnnnnnnnnnnnnnnnnnnnnnnnnnnnnnnnnnnnnnnnnnnnnnnnnnnnnnnnnnnnnnnnnnnnnnnnnnnnnnnnnnnnnnnnnnnnnnnnnnnnnnnnnnnnnnnnnnnnnnnnnnnnnnnnnnnnnnnnnnnnnnnnnnnnnnnnnnnnnnnnnnnnnnnnnnnnnnnnnnnnnnnnnnnnnnnnnnnnnnnnnnnnnnnnnnnnnnnnnnnnnnnnnnnnnnnnnnnnnnnnnnnnnnnnnnnnnnnnnnnnnnnnnnnnnnnnnnnnnnnnnnnnnnnnnnnnnnnnnnnnnnnnnnnnnnnnnnnnnnnnnnnnnnnnnnnnnnnnnnnnnnnnnnnnnnnnnnnnnnnnnnnnnnnnnnnnnnnnnnnnnnnnnnnnnnnnnnnnnnnnnnnnnnnnnnnnnnnnnnnnnnnnnnnnnnnnnnnnnnnnnnnnnnnnnnnnnnnnnnnnnnnnnnnnnnnnnnnnnnnnnnnnnnnnnnnnnnnnnnnnnnnnnnnnnnnnnnnnnnnnnnnnnnnnnnnnnnnnnnnnnnnnnnnnnnnnnnnnnnnnnnnnnnnnnnnnnnnnnnnnnnnnnnnnnnnnnnnnnnnnnnnnnnnnnnnnnnnnnnnnnnnnnnnnnnnnnnnnnnnnnnnnnnnnnnnnnnnnnnnnnnnnnnnnnnnnnnnnnnnnnnnnnnnnnnnnnnnnnnnnnnnnnnnnnnnnnnnnnnnnnnnnnnnnnnnnnnnnnnnnnnnnnnnnnnnnnnnnnnnnnnnnnnnnnnnnnnnnnnnnnnnnnnnnnnnnnnnnnnnnnnnnnnnnnnnnnnnnnnnnnnnnnnnnnnnnnnnnnnnnnnnnnnnnnnnnnnnnnnnnnnnnnnnnnnnnnnnnnnnnnnnnnnnnnnnnnnnnnnnnnnnnnnnnnnnnnnnnnnnnnnnnnnnnnnnnnnnnnnnnnnnnnnnnnnnnnnnnnnnnnnnnnnnnnnnnnnnnnnnnnnnnnnnnnnnnnnnnnnnnnnnnnnnnnnnnnnnnnnnnnnnnnnnnnnnnnnnnnnnnnnnnnnnnnnnnnnnnnnnnnnnnnnnnnnnnnnnnnnnnnnnnnnnnnnnnnnnnnnnnnnnnnnnnnnnnnnnnnnnnnnnnnnnnnnnnnnnnnnnnnnnnnnnnnnnnnnnnnnnnnnnnnnnnnnnnnnnnnnnnnnnnnnnnnnnnnnnnnnnnnnnnnnnnnnnnnnnnnnnnnnnnnnnnnnnnnnnnnnnnnnnnnnnnnnnnnnnnnnnnnnnnnnnnnnnnnnnnnnnnnnnnnnnnnnnnnnnnnnnnnnnnnnnnnnnnnnnnnnnnnnnnnnnnnnnnnnnnnnnnnnnnnnnnnnnnnnnnnnnnnnnnnnnnnnnnnnnnnnnnnnnnnnnnnnnnnnnnnnnnnnnnnnnnnnnnnnnnnnnnnnnnnnnnnnnnnnnnnnnnnnnnnnnnnnnnnnnnnnnnnnnnnnnnnnnnnnnnnnnnnnnnnnnnnnnnnnnnnnnnnnnnnnnnnnnnnnnnnnnnnnnnnnnnnnnnnnnnnnnnnnnnnnnnnnnnnnnnnnnnnnnnnnnnnnnnnnnnnnnnnnnnnnnnnnnnnnnnnnnnnnnnnnnnnnnnnnnnnnnnnnnnnnnnnnnnnnnnnnnnnnnnnnnnnnnnnnnnnnnnnnnnnnnnnnnnnnnnnnnnnnnnnnnnnnnnnnnnnnnnnnnnnnnnnnnnnnnnnnnnnnnnnnnnnnnnnnnnnnnnnnnnnnnnnnnnnnnnnnnnnnnnnnnnnnnnnnnnnnnnnnnnnnnnnnnnnnnnnnnnnnnnnnnnnnnnnnnnnnnnnnnnnnnnnnnnnnnnnnnnnnnnnnnnnnnnnnnnnnnnnnnnnnnnnnnnnnnnnnnnnnnnnnnnnnnnnnnnnnnnnnnnnnnnnnnnnnnnnnnnnnnnnnnnnnnnnnnnnnnnnnnnnnnnnnnnnnnnnnnnnnnnnnnnnnnnnnnnnnnnnnnnnnnnnnnnnnnnnnnnnnnnnnnnnnnnnnnnnnnnnnnnnnnnnnnnnnnnnnnnnnnnnnnnnnnnnnnnnnnnnnnnnnnnnnnnnnnnnnnnnnnnnnnnnnnnnnnnnnnnnnnnnnnnnnnnnnnnnnnnnnnnnnnnnnnnnnnnnnnnnnnnnnnnnnnnnnnnnnnnnnnnnnnnnnnnnnnnnnnnnnnnnnnnnnnnnnnnnnnnnnnnnnnnnnnnnnnnnnnnnnnnnnnnnnnnnnnnnnnnnnnnnnnnnnnnnnnnnnnnnnnnnnnnnnnnnnnnnnnnnnnnnnnnnnnnnnnnnnnnnnnnnnnnnnnnnnnnnnnnnnnnnnnnnnnnnnnnnnnnnnnnnnnnnnnnnnnnnnnnnnnnnnnnnnnnnnnnnnnnnnnnnnnnnnnnnnnnnnnnnnnnnnnnnnnnnnnnnnnnnnnnnnnnnnnnnnnnnnnnnnnnnnnnnnnnnnnnnnnnnnnnnnnnnnnnnnnnnnnnnnnnnnnnnnnnnnnnnnnnnnnnnnnnnnnnnnnnnnnnnnnnnnnnnnnnnnnnnnnnnnnnnnnnnnnnnnnnnnnnnnnnnnnnnnnnnnnnnnnnnnnnnnnnnnnnnnnnnnnnnnnnnnnnnnnnnnnnnnnnnnnnnnnnnnnnnnnnnnnnnnnnnnnnnnnnnnnnnnnnnnnnnnnnnnnnnnnnnnnnnnnnnnnnnnnnnnnnnnnnnnnnnnnnnnnnnnnnnnnnnnnnnnnnnnnnnnnnnnnnnnnnnnnnnnnnnnnnnnnnnnnnnnnnnnnnnnnnnnnnnnnnnnnnnnnnnnnnnnnnnnnnnnnnnnnnnnnnnnnnnnnnnnnnnnnnnnnnnnnnnnnnnnnnnnnnnnnnnnnnnnnnnnnnnnnnnnnnnnnnnnnnnnnnnnnnnnnnnnnnnnnnnnnnnnnnnnnnnnnnnnnnnnnnnnnnnnnnnnnnnnnnnnnnnnnnnnnnnnnnnnnnnnnnnnnnnnnnnnnnnnnnnnnnnnnnnnnnnnnnnnnnnnnnnnnnnnnnnnnnnnnnnnnnnnnnnnnnnnnnnnnnnnnnnnnnnnnnnnnnnnnnnnnnnnnnnnnnnnnnnnnnnnnnnnnnnnnnnnnnnnnnnnnnnnnnnnnnnnnnnnnnnnnnnnnnnnnnnnnnnnnnnnnnnnnnnnnnnnnnnnnnnnnnnnnnnnnnnnnnnnnnnnnnnnnnnnnnnnnnnnnnnnnnnnnnnnnnnnnnnnnnnnnnnnnnnnnnnnnnnnnnnnnnnnnnnnnnnnnnnnnnnnnnnnnnnnnnnnnnnnnnnnnnnnnnnnnnnnnnnnnnnnnnnnnnnnnnnnnnnnnnnnnnnnnnnnnnnnnnnnnnnnnnnnnnnnnnnnnnnnnnnnnnnnnnnnnnnnnnnnnnnnnnnnnnnnnnnnnnnnnnnnnnnnnnnnnnnnnnnnnnnnnnnnnnnnnnnnnnnnnnnnnnnnnnnnnnnnnnnnnnnnnnnnnnnnnnnnnnnnnnnnnnnnnnnnnnnnnnnnnnnnnnnnnnnnnnnnnnnnnnnnnnnnnnnnnnnnnnnnnnnnnnnnnnnnnnnnnnnnnnnnnnnnnnnnnnnnnnnnnnnnnnnnnnnnnnnnnnnnnnnnnnnnnnnnnnnnnnnnnnnnnnnnnnnnnnnnnnnnnnnnnnnnnnnnnnnnnnnnnnnnnnnnnnnnnnnnnnnnnnnnnnnnnnnnnnnnnnnnnnnnnnnnnnnnnnnnnnnnnnnnnnnnnnnnnnnnnnnnnnnnnnnnnnnnnnnnnnnnnnnnnnnnnnnnnnnnnnnnnnnnnnnnnnnnnnnnnnnnnnnnnnnnnnnnnnnnnnnnnnnnnnnnnnnnnnnnnnnnnnnnnnnnnnnnnnnnnnnnnnnnnnnnnnnnnnnnnnnnnnnnnnnnnnnnnnnnnnnnnnnnnnnnnnnnnnnnnnnnnnnnnnnnnnnnnnnnnnnnnnnnnnnnnnnnnnnnnnnnnnnnnnnnnnnnnnnnnnnnnnnnnnnnnnnnnnnnnnnnnnnnnnnnnnnnnnnnnnnnnnnnnnnnnnnnnnnnnnnnnnnnnnnnnnnnnnnnnnnnnnnnnnnnnnnnnnnnnnnnnnnnnnnnnnnnnnnnnnnnnnnnnnnnnnnnnnnnnnnnnnnnnnnnnnnnnnnnnnnnnnnnnnnnnnnnnnnnnnnnnnnnnnnnnnnnnnnnnnnnnnnnnnnnnnnnnnnnnnnnnnnnnnnnnnnnnnnnnnnnnnnnnnnnnnnnnnnnnnnnnnnnnnnnnnnnnnnnnnnnnnnnnnnnnnnnnnnnnnnnnnnnnnnnnnnnnnnnnnnnnnnnnnnnnnnnnnnnnnnnnnnnnnnnnnnnnnnnnnnnnnnnnnnnnnnnnnnnnnnnnnnnnnnnnnnnnnnnnnnnnnnnnnnnnnnnnnnnnnnnnnnnnnnnnnnnnnnnnnnnnnnnnnnnnnnnnnnnnnnnnnnnnnnnnnnnnnnnnnnnnnnnnnnnnnnnnnnnnnnnnnnnnnnnnnnnnnnnnnnnnnnnnnnnnnnnnnnnnnnnnnnnnnnnnnnnnnnnnnnnnnnnnnnnnnnnnnnnnnnnnnnnnnnnnnnnnnnnnnnnnnnnnnnnnnnnnnnnnnnnnnnnnnnnnnnnnnnnnnnnnnnnnnnnnnnnnnnnnnnnnnnnnnnnnnnnnnnnnnnnnnnnnnnnnnnnnnnnnnnnnnnnnnnnnnnnnnnnnnnnnnnnnnnnnnnnnnnnnnnnnnnnnnnnnnnnnnnnnnnnnnnnnnnnnnnnnnnnnnnnnnnnnnnnnnnnnnnnnnnnnnnnnnnnnnnnnnnnnnnnnnnnnnnnnnnnnnnnnnnnnnnnnnnnnnnnnnnnnnnnnnnnnnnnnnnnnnnnnnnnnnnnnnnnnnnnnnnnnnnnnnnnnnnnnnnnnnnnnnnnnnnnnnnnnnnnnnnnnnnnnnnnnnnnnnnnnnnnnnnnnnnnnnnnnnnnnnnnnnnnnnnnnnnnnnnnnnnnnnnnnnnnnnnnnnnnnnnnnnnnnnnnnnnnnnnnnnnnnnnnnnnnnnnnnnnnnnnnnnnnnnnnnnnnnnnnnnnnnnnnnnnnnnnnnnnnnnnnnnnnnnnnnnnnnnnnnnnnnnnnnnnnnnnnnnnnnnnnnnnnnnnnnnnnnnnnnnnnnnnnnnnnnnnnnnnnnnnnnnnnnnnnnnnnnnnnnnnnnnnnnnnnnnnnnnnnnnnnnnnnnnnnnnnnnnnnnnnnnnnnnnnnnnnnnnnnnnnnnnnnnnnnnnnnnnnnnnnnnnnnnnnnnnnnnnnnnnnnnnnnnnnnnnnnnnnnnnnnnnnnnnnnnnnnnnnnnnnnnnnnnnnnnnnnnnnnnnnnnnnnnnnnnnnnnnnnnnnnnnnnnnnnnnnnnnnnnnnnnnnnnnnnnnnnnnnnnnnnnnnnnnnnnnnnnnnnnnnnnnnnnnnnnnnnnnnnnnnnnnnnnnnnnnnnnnnnnnnnnnnnnnnnnnnnnnnnnnnnnnnnnnnnnnnnnnnnnnnnnnnnnnnnnnnnnnnnnnnnnnnnnnnnnnnnnnnnnnnnnnnnnnnnnnnnnnnnnnnnnnnnnnnnnnnnnnnnnnnnnnnnnnnnnnnnnnnnnnnnnnnnnnnnnnnnnnnnnnnnnnnnnnnnnnnnnnnnnnnnnnnnnnnnnnnnnnnnnnnnnnnnnnnnnnnnnnnnnnnnnnnnnnnnnnnnnnnnnnnnnnnnnnnnnnnnnnnnnnnnnnnnnnnnnnnnnnnnnnnnnnnnnnnnnnnnnnnnnnnnnnnnnnnnnnnnnnnnnnnnnnnnnnnnnnnnnnnnnnnnnnnnnnnnnnnnnnnnnnnnnnnnnnnnnnnnnnnnnnnnnnnnnnnnnnnnnnnnnnnnnnnnnnnnnnnnnnnnnnnnnnnnnnnnnnnnnnnnnnnnnnnnnnnnnnnnnnnnnnnnnnnnnnnnnnnnnnnnnnnnnnnnnnnnnnnnnnnnnnnnnnnnnnnnnnnnnnnnnnnnnnnnnnnnnnnnnnnnnnnnnnnnnnnnnnnnnnnnnnnnnnnnnnnnnnnnnnnnnnnnnnnnnnnnnnnnnnnnnnnnnnnnnnnnnnnnnnnnnnnnnnnnnnnnnnnnnnnnnnnnnnnnnnnnnnnnnnnnnnnnnnnnnnnnnnnnnnnnnnnnnnnnnnnnnnnnnnnnnnnnnnnnnnnnnnnnnnnnnnnnnnnnnnnnnnnnnnnnnnnnnnnnnnnnnnnnnnnnnnnnnnnnnnnnnnnnnnnnnnnnnnnnnnnnnnnnnnnnnnnnnnnnnnnnnnnnnnnnnnnnnnnnnnnnnnnnnnnnnnnnnnnnnnnnnnnnnnnnnnnnnnnnnnnnnnnnnnnnnnnnnnnnnnnnnnnnnnnnnnnnnnnnnnnnnnnnnnnnnnnnnnnnnnnnnnnnnnnnnnnnnnnnnnnnnnnnnnnnnnnnnnnnnnnnnnnnnnnnnnnnnnnnnnnnnnnnnnnnnnnnnnnnnnnnnnnnnnnnnnnnnnnnnnnnnnnnnnnnnnnnnnnnnnnnnnnnnnnnnnnnnnnnnnnnnnnnnnnnnnnnnnnnnnnnnnnnnnnnnnnnnnnnnnnnnnnnnnnnnnnnnnnnnnnnnnnnnnnnnnnnnnnnnnnnnnnnnnnnnnnnnnnnnnnnnnnnnnnnnnnnnnnnnnnnnnnnnnnnnnnnnnnnnnnnnnnnnnnnnnnnnnnnnnnnnnnnnnnnnnnnnnnnnnnnnnnnnnnnnnnnnnnnnnnnnnnnnnnnnnnnnnnnnnnnnnnnnnnnnnnnnnnnnnnnnnnnnnnnnnnnnnnnnnnnnnnnnnnnnnnnnnnnnnnnnnnnnnnnnnnnnnnnnnnnnnnnnnnnnnnnnnnnnnnnnnnnnnnnnnnnnnnnnnnnnnnnnnnnnnnnnnnnnnnnnnnnnnnnnnnnnnnnnnnnnnnnnnnnnnnnnnnnnnnnnnnnnnnnnnnnnnnnnnnnnnnnnnnnnnnnnnnnnnnnnnnnnnnnnnnnnnnnnnnnnnnnnnnnnnnnnnnnnnnnnnnnnnnnnnnnnnnnnnnnnnnnnnnnnnnnnnnnnnnnnnnnnnnnnnnnnnnnnnnnnnnnnnnnnnnnnnnnnnnnnnnnnnnnnnnnnnnnnnnnnnnnnnnnnnnnnnnnnnnnnnnnnnnnnnnnnnnnnnnnnnnnnnnnnnnnnnnnnnnnnnnnnnnnnnnnnnnnnnnnnnnnnnnnnnnnnnnnnnnnnnnnnnnnnnnnnnnnnnnnnnnnnnnnnnnnnnnnnnnnnnnnnnnnnnnnnnnnnnnnnnnnnnnnnnnnnnnnnnnnnnnnnnnnnnnnnnnnnnnnnnnnnnnnnnnnnnnnnnnnnnnnnnnnnnnnnnnnnnnnnnnnnnnnnnnnnnnnnnnnnnnnnnnnnnnnnnnnnnnnnnnnnnnnnnnnnnnnnnnnnnnnnnnnnnnnnnnnnnnnnnnnnnnnnnnnnnnnnnnnnnnnnnnnnnnnnnnnnnnnnnnnnnnnnnnnnnnnnnnnnnnnnnnnnnnnnnnnnnnnnnnnnnnnnnnnnnnnnnnnnnnnnnnnnnnnnnnnnnnnnnnnnnnnnnnnnnnnnnnnnnnnnnnnnnnnnnnnnnnnnnnnnnnnnnnnnnnnnnnnnnnnnnnnnnnnnnnnnnnnnnnnnnnnnnnnnnnnnnnnnnnnnnnnnnnnnnnnnnnnnnnnnnnnnnnnnnnnnnnnnnnnnnnnnnnnnnnnnnnnnnnnnnnnnnnnnnnnnnnnnnnnnnnnnnnnnnnnnnnnnnnnnnnnnnnnnnnnnnnnnnnnnnnnnnnnnnnnnnnnnnnnnnnnnnnnnnnnnnnnnnnnnnnnnnnnnnnnnnnnnnnnnnnnnnnnnnnnnnnnnnnnnnnnnnnnnnnnnnnnnnnnnnnnnnnnnnnnnnnnnnnnnnnnnnnnnnnnnnnnnnnnnnnnnnnnnnnnnnnnnnnnnnnnnnnnnnnnnnnnnnnnnnnnnnnnnnnnnnnnnnnnnnnnnnnnnnnnnnnnnnnnnnnnnnnnnnnnnnnnnnnnnnnnnnnnnnnnnnnnnnnnnnnnnnnnnnnnnnnnnnnnnnnnnnnnnnnnnnnnnnnnnnnnnnnnnnnnnnnnnnnnnnnnnnnnnnnnnnnnnnnnnnnnnnnnnnnnnnnnnnnnnnnnnnnnnnnnnnnnnnnnnnnnnnnnnnnnnnnnnnnnnnnnnnnnnnnnnnnnnnnnnnnnnnnnnnnnnnnnnnnnnnnnnnnnnnnnnnnnnnnnnnnnnnnnnnnnnnnnnnnnnnnnnnnnnnnnnnnnnnnnnnnnnnnnnnnnnnnnnnnnnnnnnnnnnnnnnnnnnnnnnnnnnnnnnnnnnnnnnnnnnnnnnnnnnnnnnnnnnnnnnnnnnnnnnnnnnnnnnnnnnnnnnnnnnnnnnnnnnnnnnnnnnnnnnnnnnnnnnnnnnnnnnnnnnnnnnnnnnnnnnnnnnnnnnnnnnnnnnnnnnnnnnnnnnnnnnnnnnnnnnnnnnnnnnnnnnnnnnnnnnnnnnnnnnnnnnnnnnnnnnnnnnnnnnnnnnnnnnnnnnnnnnnnnnnnnnnnnnnnnnnnnnnnnnnnnnnnnnnnnnnnnnnnnnnnnnnnnnnnnnnnnnnnnnnnnnnnnnnnnnnnnnnnnnnnnnnnnnnnnnnnnnnnnnnnnnnnnnnnnnnnnnnnnnnnnnnnnnnnnnnnnnnnnnnnnnnnnnnnnnnnnnnnnnnnnnnnnnnnnnnnnnnnnnnnnnnnnnnnnnnnnnnnnnnnnnnnnnnnnnnnnnnnnnnnnnnnnnnnnnnnnnnnnnnnnnnnnnnnnnnnnnnnnnnnnnnnnnnnnnnnnnnnnnnnnnnnnnnnnnnnnnnnnnnnnnnnnnnnnnnnnnnnnnnnnnnnnnnnnnnnnnnnnnnnnnnnnnnnnnnnnnnnnnnnnnnnnnnnnnnnnnnnnnnnnnnnnnnnnnnnnnnnnnnnnnnnnnnnnnnnnnnnnnnnnnnnnnnnnnnnnnnnnnnnnnnnnnnnnnnnnnnnnnnnnnnnnnnnnnnnnnnnnnnnnnnnnnnnnnnnnnnnnnnnnnnnnnnnnnnnnnnnnnnnnnnnnnnnnnnnnnnnnnnnnnnnnnnnnnnnnnnnnnnnnnnnnnnnnnnnnnnnnnnnnnnnnnnnnnnnnnnnnnnnnnnnnnnnnnnnnnnnnnnnnnnnnnnnnnnnnnnnnnnnnnnnnnnnnnnnnnnnnnnnnnnnnnnnnnnnnnnnnnnnnnnnnnnnnnnnnnnnnnnnnnnnnnnnnnnnnnnnnnnnnnnnnnnnnnnnnnnnnnnnnnnnnnnnnnnnnnnnnnnnnnnnnnnnnnnnnnnnnnnnnnnnnnnnnnnnnnnnnnnnnnnnnnnnnnnnnnnnnnnnnnnnnnnnnnnnnnnnnnnnnnnnnnnnnnnnnnnnnnnnnnnnnnnnnnnnnnnnnnnnnnnnnnnnnnnnnnnnnnnnnnnnnnnnnnnnnnnnnnnnnnnnnnnnnnnnnnnnnnnnnnnnnnnnnnnnnnnnnnnnnnnnnnnnnnnnnnnnnnnnnnnnnnnnnnnnnnnnnnnnnnnnnnnnnnnnnnnnnnnnnnnnnnnnnnnnnnnnnnnnnnnnnnnnnnnnnnnnnnnnnnnnnnnnnnnnnnnnnnnnnnnnnnnnnnnnnnnnnnnnnnnnnnnnnnnnnnnnnnnnnnnnnnnnnnnnnnnnnnnnnnnnnnnnnnnnnnnnnnnnnnnnnnnnnnnnnnnnnnnnnnnnnnnnnnnnnnnnnnnnnnnnnnnnnnnnnnnnnnnnnnnnnnnnnnnnnnnnnnnnnnnnnnnnnnnnnnnnnnnnnnnnnnnnnnnnnnnnnnnnnnnnnnnnnnnnnnnnnnnnnnnnnnnnnnnnnnnnnnnnnnnnnnnnnnnnnnnnnnnnnnnnnnnnnnnnnnnnnnnnnnnnnnnnnnnnnnnnnnnnnnnnnnnnnnnnnnnnnnnnnnnnnnnnnnnnnnnnnnnnnnnnnnnnnnnnnnnnnnnnnnnnnnnnnnnnnnnnnnnnnnnnnnnnnnnnnnnnnnnnnnnnnnnnnnnnnnnnnnnnnnnnnnnnnnnnnnnnnnnnnnnnnnnnnnnnnnnnnnnnnnnnnnnnnnnnnnnnnnnnnnnnnnnnnnnnnnnnnnnnnnnnnnnnnnnnnnnnnnnnnnnnnnnnnnnnnnnnnnnnnnnnnnnnnnnnnnnnnnnnnnnnnnnnnnnnnnnnnnnnnnnnnnnnnnnnnnnnnnnnnnnnnnnnnnnnnnnnnnnnnnnnnnnnnnnnnnnnnnnnnnnnnnnnnnnnnnnnnnnnnnnnnnnnnnnnnnnnnnnnnnnnnnnnnnnnnnnnnnnnnnnnnnnnnnnnnnnnnnnnnnnnnnnnnnnnnnnnnnnnnnnnnnnnnnnnnnnnnnnnnnnnnnnnnnnnnnnnnnnnnnnnnnnnnnnnnnnnnnnnnnnnnnnnnnnnnnnnnnnnnnnnnnnnnnnnnnnnnnnnnnnnnnnnnnnnnnnnnnnnnnnnnnnnnnnnnnnnnnnnnnnnnnnnnnnnnnnnnnnnnnnnnnnnnnnnnnnnnnnnnnnnnnnnnnnnnnnnnnnnnnnnnnnnnnnnnnnnnnnnnnnnnnnnnnnnnnnnnnnnnnnnnnnnnnnnnnnnnnnnnnnnnnnnnnnnnnnnnnnnnnnnnnnnnnnnnnnnnnnnnnnnnnnnnnnnnnnnnnnnnnnnnnnnnnnnnnnnnnnnnnnnnnnnnnnnnnnnnnnnnnnnnnnnnnnnnnnnnnnnnnnnnnnnnnnnnnnnnnnnnnnnnnnnnnnnnnnnnnnnnnnnnnnnnnnnnnnnnnnnnnnnnnnnnnnnnnnnnnnnnnnnnnnnnnnnnnnnnnnnnnnnnnnnnnnnnnnnnnnnnnnnnnnnnnnnnnnnnnnnnnnnnnnnnnnnnnnnnnnnnnnnnnnnnnnnnnnnnnnnnnnnnnnnnnnnnnnnnnnnnnnnnnnnnnnnnnnnnnnnnnnnnnnnnnnnnnnnnnnnnnnnnnnnnnnnnnnnnnnnnnnnnnnnnnnnnnnnnnnnnnnnnnnnnnnnnnnnnnnnnnnnnnnnnnnnnnnnnnnnnnnnnnnnnnnnnnnnnnnnnnnnnnnnnnnnnnnnnnnnnnnnnnnnnnnnnnnnnnnnnnnnnnnnnnnnnnnnnnnnnnnnnnnnnnnnnnnnnnnnnnnnnnnnnnnnnnnnnnnnnnnnnnnnnnnnnnnnnnnnnnnnnnnnnnnnnnnnnnnnnnnnnnnnnnnnnnnnnnnnnnnnnnnnnnnnnnnnnnnnnnnnnnnnnnnnnnnnnnnnnnnnnnnnnnnnnnnnnnnnnnnnnnnnnnnnnnnnnnnnnnnnnnnnnnnnnnnnnnnnnnnnnnnnnnnnnnnnnnnnnnnnnnnnnnnnnnnnnnnnnnnnnnnnnnnnnnnnnnnnnnnnnnnnnnnnnnnnnnnnnnnnnnnnnnnnnnnnnnnnnnnnnnnnnnnnnnnnnnnnnnnnnnnnnnnnnnnnnnnnnnnnnnnnnnnnnnnnnnnnnnnnnnnnnnnnnnnnnnnnnnnnnnnnnnnnnnnnnnnnnnnnnnnnnnnnnnnnnnnnnnnnnnnnnnnnnnnnnnnnnnnnnnnnnnnnnnnnnnnnnnnnnnnnnnnnnnnnnnnnnnnnnnnnnnnnnnnnnnnnnnnnnnnnnnnnnnnnnnnnnnnnnnnnnnnnnnnnnnnnnnnnnnnnnnnnnnnnnnnnnnnnnnnnnnnnnnnnnnnnnnnnnnnnnnnnnnnnnnnnnnnnnnnnnnnnnnnnnnnnnnnnnnnnnnnnnnnnnnnnnnnnnnnnnnnnnnnnnnnnnnnnnnnnnnnnnnnnnnnnnnnnnnnnnnnnnnnnnnnnnnnnnnnnnnnnnnnnnnnnnnnnnnnnnnnnnnnnnnnnnnnnnnnnnnnnnnnnnnnnnnnnnnnnnnnnnnnnnnnnnnnnnnnnnnnnnnnnnnnnnnnnnnnnnnnnnnnnnnnnnnnnnnnnnnnnnnnnnnnnnnnnnnnnnnnnnnnnnnnnnnnnnnnnnnnnnnnnnnnnnnnnnnnnnnnnnnnnnnnnnnnnnnnnnnnnnnnnnnnnnnnnnnnnnnnnnnnnnnnnnnnnnnnnnnnnnnnnnnnnnnnnnnnnnnnnnnnnnnnnnnnnnnnnnnnnnnnnnnnnnnnnnnnnnnnnnnnnnnnnnnnnnnnnnnnnnnnnnnnnnnnnnnnnnnnnnnnnnnnnnnnnnnnnnnnnnnnnnnnnnnnnnnnnnnnnnnnnnnnnnnnnnnnnnnnnnnnnnnnnnnnnnnnnnnnnnnnnnnnnnnnnnnnnnnnnnnnnnnnnnnnnnnnnnnnnnnnnnnnnnnnnnnnnnnnnnnnnnnnnnnnnnnnnnnnnnnnnnnnnnnnnnnnnnnnnnnnnnnnnnnnnnnnnnnnnnnnnnnnnnnnnnnnnnnnnnnnnnnnnnnnnnnnnnnnnnnnnnnnnnnnnnnnnnnnnnnnnnnnnnnnnnnnnnnnnnnnnnnnnnnnnnnnnnnnnnnnnnnnnnnnnnnnnnnnnnnnnnnnnnnnnnnnnnnnnnnnnnnnnnnnnnnnnnnnnnnnnnnnnnnnnnnnnnnnnnnnnnnnnnnnnnnnnnnnnnnnnnnnnnnnnnnnnnnnnnnnnnnnnnnnnnnnnnnnnnnnnnnnnnnnnnnnnnnnnnnnnnnnnnnnnnnnnnnnnnnnnnnnnnnnnnnnnnnnnnnnnnnnnnnnnnnnnnnnnnnnnnnnnnnnnnnnnnnnnnnnnnnnnnnnnnnnnnnnnnnnnnnnnnnnnnnnnnnnnnnnnnnnnnnnnnnnnnnnnnnnnnnnnnnnnnnnnnnnnnnnnnnnnnnnnnnnnnnnnnnnnnnnnnnnnnnnnnnnnnnnnnnnnnnnnnnnnnnnnnnnnnnnnnnnnnnnnnnnnnnnnnnnnnnnnnnnnnnnnnnnnnnnnnnnnnnnnnnnnnnnnnnnnnnnnnnnnnnnnnnnnnnnnnnnnnnnnnnnnnnnnnnnnnnnnnnnnnnnnnnnnnnnnnnnnnnnnnnnnnnnnnnnnnnnnnnnnnnnnnnnnnnnnnnnnnnnnnnnnnnnnnnnnnnnnnnnnnnnnnnnnnnnnnnnnnnnnnnnnnnnnnnnnnnnnnnnnnnnnnnnnnnnnnnnnnnnnnnnnnnnnnnnnnnnnnnnnnnnnnnnnnnnnnnnnnnnnnnnnnnnnnnnnnnnnnnnnnnnnnnnnnnnnnnnnnnnnnnnnnnnnnnnnnnnnnnnnnnnnnnnnnnnnnnnnnnnnnnnnnnnnnnnnnnnnnnnnnnnnnnnnnnnnnnnnnnnnnnnnnnnnnnnnnnnnnnnnnnnnnnnnnnnnnnnnnnnnnnnnnnnnnnnnnnnnnnnnnnnnnnnnnnnnnnnnnnnnnnnnnnnnnnnnnnnnnnnnnnnnnnnnnnnnnnnnnnnnnnnnnnnnnnnnnnnnnnnnnnnnnnnnnnnnnnnnnnnnnnnnnnnnnnnnnnnnnnnnnnnnnnnnnnnnnnnnnnnnnnnnnnnnnnnnnnnnnnnnnnnnnnnnnnnnnnnnnnnnnnnnnnnnnnnnnnnnnnnnnnnnnnnnnnnnnnnnnnnnnnnnnnnnnnnnnnnnnnnnnnnnnnnnnnnnnnnnnnnnnnnnnnnnnnnnnnnnnnnnnnnnnnnnnnnnnnnnnnnnnnnnnnnnnnnnnnnnnnnnnnnnnnnnnnnnnnnnnnnnnnnnnnnnnnnnnnnnnnnnnnnnnnnnnnnnnnnnnnnnnnnnnnnnnnnnnnnnnnnnnnnnnnnnnnnnnnnnnnnnnnnnnnnnnnnnnnnnnnnnnnnnnnnnnnnnnnnnnnnnnnnnnnnnnnnnnnnnnnnnnnnnnnnnnnnnnnnnnnnnnnnnnnnnnnnnnnnnnnnnnnnnnnnnnnnnnnnnnnnnnnnnnnnnnnnnnnnnnnnnnnnnnnnnnnnnnnnnnnnnnnnnnnnnnnnnnnnnnnnnnnnnnnnnnnnnnnnnnnnnnnnnnnnnnnnnnnnnnnnnnnnnnnnnnnnnnnnnnnnnnnnnnnnnnnnnnnnnnnnnnnnnnnnnnnnnnnnnnnnnnnnnnnnnnnnnnnnnnnnnnnnnnnnnnnnnnnnnnnnnnnnnnnnnnnnnnnnnnnnnnnnnnnnnnnnnnnnnnnnnnnnnnnnnnnnnnnnnnnnnnnnnnnnnnnnnnnnnnnnnnnnnnnnnnnnnnnnnnnnnnnnnnnnnnnnnnnnnnnnnnnnnnnnnnnnnnnnnnnnnnnnnnnnnnnnnnnnnnnnnnnnnnnnnnnnnnnnnnnnnnnnnnnnnnnnnnnnnnnnnnnnnnnnnnnnnnnnnnnnnnnnnnnnnnnnnnnnnnnnnnnnnnnnnnnnnnnnnnnnnnnnnnnnnnnnnnnnnnnnnnnnnnnnnnnnnnnnnnnnnnnnnnnnnnnnnnnnnnnnnnnnnnnnnnnnnnnnnnnnnnnnnnnnnnnnnnnnnnnnnnnnnnnnnnnnnnnnnnnnnnnnnnnnnnnnnnnnnnnnnnnnnnnnnnnnnnnnnnnnnnnnnnnnnnnnnnnnnnnnnnnnnnnnnnnnnnnnnnnnnnnnnnnnnnnnnnnnnnnnnnnnnnnnnnnnnnnnnnnnnnnnnnnnnnnnnnnnnnnnnnnnnnnnnnnnnnnnnnnnnnnnnnnnnnnnnnnnnnnnnnnnnnnnnnnnnnnnnnnnnnnnnnnnnnnnnnnnnnnnnnnnnnnnnnnnnnnnnnnnnnnnnnnnnnnnnnnnnnnnnnnnnnnnnnnnnnnnnnnnnnnnnnnnnnnnnnnnnnnnnnnnnnnnnnnnnnnnnnnnnnnnnnnnnnnnnnnnnnnnnnnnnnnnnnnnnnnnnnnnnnnnnnnnnnnnnnnnnnnnnnnnnnnnnnnnnnnnnnnnnnnnnnnnnnnnnnnnnnnnnnnnnnnnnnnnnnnnnnnnnnnnnnnnnnnnnnnnnnnnnnnnnnnnnnnnnnnnnnnnnnnnnnnnnnnnnnnnnnnnnnnnnnnnnnnnnnnnnnnnnnnnnnnnnnnnnnnnnnnnnnnnnnnnnnnnnnnnnnnnnnnnnnnnnnnnnnnnnnnnnnnnnnnnnnnnnnnnnnnnnnnnnnnnnnnnnnnnnnnnnnnnnnnnnnnnnnnnnnnnnnnnnnnnnnnnnnnnnnnnnnnnnnnnnnnnnnnnnnnnnnnnnnnnnnnnnnnnnnnnnnnnnnnnnnnnnnnnnnnnnnnnnnnnnnnnnnnnnnnnnnnnnnnnnnnnnnnnnnnnnnnnnnnnnnnnnnnnnnnnnnnnnnnnnnnnnnnnnnnnnnnnnnnnnnnnnnnnnnnnnnnnnnnnnnnnnnnnnnnnnnnnnnnnnnnnnnnnnnnnnnnnnnnnnnnnnnnnnnnnnnnnnnnnnnnnnnnnnnnnnnnnnnnnnnnnnnnnnnnnnnnnnnnnnnnnnnnnnnnnnnnnnnnnnnnnnnnnnnnnnnnnnnnnnnnnnnnnnnnnnnnnnnnnnnnnnnnnnnnnnnnnnnnnnnnnnnnnnnnnnnnnnnnnnnnnnnnnnnnnnnnnnnnnnnnnnnnnnnnnnnnnnnnnnnnnnnnnnnnnnnnnnnnnnnnnnnnnnnnnnnnnnnnnnnnnnnnnnnnnnnnnnnnnnnnnnnnnnnnnnnnnnnnnnnnnnnnnnnnnnnnnnnnnnnnnnnnnnnnnnnnnnnnnnnnnnnnnnnnnnnnnnnnnnnnnnnnnnnnnnnnnnnnnnnnnnnnnnnnnnnnnnnnnnnnnnnnnnnnnnnnnnnnnnnnnnnnnnnnnnnnnnnnnnnnnnnnnnnnnnnnnnnnnnnnnnnnnnnnnnnnnnnnnnnnnnnnnnnnnnnnnnnnnnnnnnnnnnnnnnnnnnnnnnnnnnnnnnnnnnnnnnnnnnnnnnnnnnnnnnnnnnnnnnnnnnnnnnnnnnnnnnnnnnnnnnnnnnnnnnnnnnnnnnnnnnnnnnnnnnnnnnnnnnnnnnnnnnnnnnnnnnnnnnnnnnnnnnnnnnnnnnnnnnnnnnnnnnnnnnnnnnnnnnnnnnnnnnnnnnnnnnnnnnnnnnnnnnnnnnnnnnnnnnnnnnnnnnnnnnnnnnnnnnnnnnnnnnnnnnnnnnnnnnnnnnnnnnnnnnnnnnnnnnnnnnnnnnnnnnnnnnnnnnnnnnnnnnnnnnnnnnnnnnnnnnnnnnnnnnnnnnnnnnnnnnnnnnnnnnnnnnnnnnnnnnnnnnnnnnnnnnnnnnnnnnnnnnnnnnnnnnnnnnnnnnnnnnnnnnnnnnnnnnnnnnnnnnnnnnnnnnnnnnnnnnnnnnnnnnnnnnnnnnnnnnnnnnnnnnnnnnnnnnnnnnnnnnnnnnnnnnnnnnnnnnnnnnnnnnnnnnnnnnnnnnnnnnnnnnnnnnnnnnnnnnnnnnnnnnnnnnnnnnnnnnnnnnnnnnnnnnnnnnnnnnnnnnnnnnnnnnnnnnnnnnnnnnnnnnnnnnnnnnnnnnnnnnnnnnnnnnnnnnnnnnnnnnnnnnnnnnnnnnnnnnnnnnnnnnnnnnnnnnnnnnnnnnnnnnnnnnnnnnnnnnnnnnnnnnnnnnnnnnnnnnnnnnnnnnnnnnnnnnnnnnnnnnnnnnnnnnnnnnnnnnnnnnnnnnnnnnnnnnnnnnnnnnnnnnnnnnnnnnnnnnnnnnnnnnnnnnnnnnnnnnnnnnnnnnnnnnnnnnnnnnnnnnnnnnnnnnnnnnnnnnnnnnnnnnnnnnnnnnnnnnnnnnnnnnnnnnnnnnnnnnnnnnnnnnnnnnnnnnnnnnnnnnnnnnnnnnnnnnnnnnnnnnnnnnnnnnnnnnnnnnnnnnnnnnnnnnnnnnnnnnnnnnnnnnnnnnnnnnnnnnnnnnnnnnnnnnnnnnnnnnnnnnnnnnnnnnnnnnnnnnnnnnnnnnnnnnnnnnnnnnnnnnnnnnnnnnnnnnnnnnnnnnnnnnnnnnnnnnnnnnnnnnnnnnnnnnnnnnnnnnnnnnnnnnnnnnnnnnnnnnnnnnnnnnnnnnnnnnnnnnnnnnnnnnnnnnnnnnnnnnnnnnnnnnnnnnnnnnnnnnnnnnnnnnnnnnnnnnnnnnnnnnnnnnnnnnnnnnnnnnnnnnnnnnnnnnnnnnnnnnnnnnnnnnnnnnnnnnnnnnnnnnnnnnnnnnnnnnnnnnnnnnnnnnnnnnnnnnnnnnnnnnnnnnnnnnnnnnnnnnnnnnnnnnnnnnnnnnnnnnnnnnnnnnnnnnnnnnnnnnnnnnnnnnnnnnnnnnnnnnnnnnnnnnnnnnnnnnnnnnnnnnnnnnnnnnnnnnnnnnnnnnnnnnnnnnnnnnnnnnnnnnnnnnnnnnnnnnnnnnnnnnnnnnnnnnnnnnnnnnnnnnnnnnnnnnnnnnnnnnnnnnnnnnnnnnnnnnnnnnnnnnnnnnnnnnnnnnnnnnnnnnnnnnnnnnnnnnnnnnnnnnnnnnnnnnnnnnnnnnnnnnnnnnnnnnnnnnnnnnnnnnnnnnnnnnnnnnnnnnnnnnnnnnnnnnnnnnnnnnnnnnnnnnnnnnnnnnnnnnnnnnnnnnnnnnnnnnnnnnnnnnnnnnnnnnnnnnnnnnnnnnnnnnnnnnnnnnnnnnnnnnnnnnnnnnnnnnnnnnnnnnnnnnnnnnnnnnnnnnnnnnnnnnnnnnnnnnnnnnnnnnnnnnnnnnnnnnnnnnnnnnnnnnnnnnnnnnnnnnnnnnnnnnnnnnnnnnnnnnnnnnnnnnnnnnnnnnnnnnnnnnnnnnnnnnnnnnnnnnnnnnnnnnnnnnnnnnnnnnnnnnnnnnnnnnnnnnnnnnnnnnnnnnnnnnnnnnnnnnnnnnnnnnnnnnnnnnnnnnnnnnnnnnnnnnnnnnnnnnnnnnnnnnnnnnnnnnnnnnnnnnnnnnnnnnnnnnnnnnnnnnnnnnnnnnnnnnnnnnnnnnnnnnnnnnnnnnnnnnnnnnnnnnnnnnnnnnnnnnnnnnnnnnnnnnnnnnnnnnnnnnnnnnnnnnnnnnnnnnnnnnnnnnnnnnnnnnnnnnnnnnnnnnnnnnnnnnnnnnnnnnnnnnnnnnnnnnnnnnnnnnnnnnnnnnnnnnnnnnnnnnnnnnnnnnnnnnnnnnnnnnnnnnnnnnnnnnnnnnnnnnnnnnnnnnnnnnnnnnnnnnnnnnnnnnnnnnnnnnnnnnnnnnnnnnnnnnnnnnnnnnnnnnnnnnnnnnnnnnnnnnnnnnnnnnnnnnnnnnnnnnnnnnnnnnnnnnnnnnnnnnnnnnnnnnnnnnnnnnnnnnnnnnnnnnnnnnnnnnnnnnnnnnnnnnnnnnnnnnnnnnnnnnnnnnnnnnnnnnnnnnnnnnnnnnnnnnnnnnnnnnnnnnnnnnnnnnnnnnnnnnnnnnnnnnnnnnnnnnnnnnnnnnnnnnnnnnnnnnnnnnnnnnnnnnnnnnnnnnnnnnnnnnnnnnnnnnnnnnnnnnnnnnnnnnnnnnnnnnnnnnnnnnnnnnnnnnnnnnnnnnnnnnnnnnnnnnnnnnnnnnnnnnnnnnnnnnnnnnnnnnnnnnnnnnnnnnnnnnnnnnnnnnnnnnnnnnnnnnnnnnnnnnnnnnnnnnnnnnnnnnnnnnnnnnnnnnnnnnnnnnnnnnnnnnnnnnnnnnnnnnnnnnnnnnnnnnnnnnnnnnnnnnnnnnnnnnnnnnnnnnnnnnnnnnnnnnnnnnnnnnnnnnnnnnnnnnnnnnnnnnnnnnnnnnnnnnnnnnnnnnnnnnnnnnnnnnnnnnnnnnnnnnnnnnnnnnnnnnnnnnnnnnnnnnnnnnnnnnnnnnnnnnnnnnnnnnnnnnnnnnnnnnnnnnnnnnnnnnnnnnnnnnnnnnnnnnnnnnnnnnnnnnnnnnnnnnnnnnnnnnnnnnnnnnnnnnnnnnnnnnnnnnnnnnnnnnnnnnnnnnnnnnnnnnnnnnnnnnnnnnnnnnnnnnnnnnnnnnnnnnnnnnnnnnnnnnnnnnnnnnnnnnnnnnnnnnnnnnnnnnnnnnnnnnnnnnnnnnnnnnnnnnnnnnnnnnnnnnnnnnnnnnnnnnnnnnnnnnnnnnnnnnnnnnnnnnnnnnnnnnnnnnnnnnnnnnnnnnnnnnnnnnnnnnnnnnnnnnnnnnnnnnnnnnnnnnnnnnnnnnnnnnnnnnnnnnnnnnnnnnnnnnnnnnnnnnnnnnnnnnnnnnnnnnnnnnnnnnnnnnnnnnnnnnnnnnnnnnnnnnnnnnnnnnnnnnnnnnnnnnnnnnnnnnnnnnnnnnnnnnnnnnnnnnnnnnnnnnnnnnnnnnnnnnnnnnnnnnnnnnnnnnnnnnnnnnnnnnnnnnnnnnnnnnnnnnnnnnnnnnnnnnnnnnnnnnnnnnnnnnnnnnnnnnnnnnnnnnnnnnnnnnnnnnnnnnnnnnnnnnnnnnnnnnnnnnnnnnnnnnnnnnnnnnnnnnnnnnnnnnnnnnnnnnnnnnnnnnnnnnnnnnnnnnnnnnnnnnnnnnnnnnnnnnnnnnnnnnnnnnnnnnnnnnnnnnnnnnnnnnnnnnnnnnnnnnnnnnnnnnnnnnnnnnnnnnnnnnnnnnnnnnnnnnnnnnnnnnnnnnnnnnnnnnnnnnnnnnnnnnnnnnnnnnnnnnnnnnnnnnnnnnnnnnnnnnnnnnnnnnnnnnnnnnnnnnnnnnnnnnnnnnnnnnnnnnnnnnnnnnnnnnnnnnnnnnnnnnnnnnnnnnnnnnnnnnnnnnnnnnnnnnnnnnnnnnnnnnnnnnnnnnnnnnnnnnnnnnnnnnnnnnnnnnnnnnnnnnnnnnnnnnnnnnnnnnnnnnnnnnnnnnnnnnnnnnnnnnnnnnnnnnnnnnnnnnnnnnnnnnnnnnnnnnnnnnnnnnnnnnnnnnnnnnnnnnnnnnnnnnnnnnnnnnnnnnnnnnnnnnnnnnnnnnnnnnnnnnnnnnnnnnnnnnnnnnnnnnnnnnnnnnnnnnnnnnnnnnnnnnnnnnnnnnnnnnnnnnnnnnnnnnnnnnnnnnnnnnnnnnnnnnnnnnnnnnnnnnnnnnnnnnnnnnnnnnnnnnnnnnnnnnnnnnnnnnnnnnnnnnnnnnnnnnnnnnnnnnnnnnnnnnnnnnnnnnnnnnnnnnnnnnnnnnnnnnnnnnnnnnnnnnnnnnnnnnnnnnnnnnnnnnnnnnnnnnnnnnnnnnnnnnnnnnnnnnnnnnnnnnnnnnnnnnnnnnnnnnnnnnnnnnnnnnnnnnnnnnnnnnnnnnnnnnnnnnnnnnnnnnnnnnnnnnnnnnnnnnnnnnnnnnnnnnnnnnnnnnnnnnnnnnnnnnnnnnnnnnnnnnnnnnnnnnnnnnnnnnnnnnnnnnnnnnnnnnnnnnnnnnnnnnnnnnnnnnnnnnnnnnnnnnnnnnnnnnnnnnnnnnnnnnnnnnnnnnnnnnnnnnnnnnnnnnnnnnnnnnnnnnnnnnnnnnnnnnnnnnnnnnnnnnnnnnnnnnnnnnnnnnnnnnnnnnnnnnnnnnnnnnnnnnnnnnnnnnnnnnnnnnnnnnnnnnnnnnnnnnnnnnnnnnnnnnnnnnnnnnnnnnnnnnnnnnnnnnnnnnnnnnnnnnnnnnnnnnnnnnnnnnnnnnnnnnnnnnnnnnnnnnnnnnnnnnnnnnnnnnnnnnnnnnnnnnnnnnnnnnnnnnnnnnnnnnnnnnnnnnnnnnnnnnnnnnnnnnnnnnnnnnnnnnnnnnnnnnnnnnnnnnnnnnnnnnnnnnnnnnnnnnnnnnnnnnnnnnnnnnnnnnnnnnnnnnnnnnnnnnnnnnnnnnnnnnnnnnnnnnnnnnnnnnnnnnnnnnnnnnnnnnnnnnnnnnnnnnnnnnnnnnnnnnnnnnnnnnnnnnnnnnnnnnnnnnnnnnnnnnnnnnnnnnnnnnnnnnnnnnnnnnnnnnnnnnnnnnnnnnnnnnnnnnnnnnnnnnnnnnnnnnnnnnnnnnnnnnnnnnnnnnnnnnnnnnnnnnnnnnnnnnnnnnnnnnnnnnnnnnnnnnnnnnnnnnnnnnnnnnnnnnnnnnnnnnnnnnnnnnnnnnnnnnnnnnnnnnnnnnnnnnnnnnnnnnnnnnnnnnnnnnnnnnnnnnnnnnnnnnnnnnnnnnnnnnnnnnnnnnnnnnnnnnnnnnnnnnnnnnnnnnnnnnnnnnnnnnnnnnnnnnnnnnnnnnnnnnnnnnnnnnnnnnnnnnnnnnnnnnnnnnnnnnnnnnnnnnnnnnnnnnnnnnnnnnnnnnnnnnnnnnnnnnnnnnnnnnnnnnnnnnnnnnnnnnnnnnnnnnnnnnnnnnnnnnnnnnnnnnnnnnnnnnnnnnnnnnnnnnnnnnnnnnnnnnnnnnnnnnnnnnnnnnnnnnnnnnnnnnnnnnnnnnnnnnnnnnnnnnnnnnnnnnnnnnnnnnnnnnnnnnnnnnnnnnnnnnnnnnnnnnnnnnnnnnnnnnnnnnnnnnnnnnnnnnnnnnnnnnnnnnnnnnnnnnnnnnnnnnnnnnnnnnnnnnnnnnnnnnnnnnnnnnnnnnnnnnnnnnnnnnnnnnnnnnnnnnnnnnnnnnnnnnnnnnnnnnnnnnnnnnnnnnnnnnnnnnnnnnnnnnnnnnnnnnnnnnnnnnnnnnnnnnnnnnnnnnnnnnnnnnnnnnnnnnnnnnnnnnnnnnnnnnnnnnnnnnnnnnnnnnnnnnnnnnnnnnnnnnnnnnnnnnnnnnnnnnnnnnnnnnnnnnnnnnnnnnnnnnnnnnnnnnnnnnnnnnnnnnnnnnnnnnnnnnnnnnnnnnnnnnnnnnnnnnnnnnnnnnnnnnnnnnnnnnnnnnnnnnnnnnnnnnnnnnnnnnnnnnnnnnnnnnnnnnnnnnnnnnnnnnnnnnnnnnnnnnnnnnnnnnnnnnnnnnnnnnnnnnnnnnnnnnnnnnnnnnnnnnnnnnnnnnnnnnnnnnnnnnnnnnnnnnnnnnnnnnnnnnnnnnnnnnnnnnnnnnnnnnnnnnnnnnnnnnnnnnnnnnnnnnnnnnnnnnnnnnnnnnnnnnnnnnnnnnnnnnnnnnnnnnnnnnnnnnnnnnnnnnnnnnnnnnnnnnnnnnnnnnnnnnnnnnnnnnnnnnnnnnnnnnnnnnnnnnnnnnnnnnnnnnnnnnnnnnnnnnnnnnnnnnnnnnnnnnnnnnnnnnnnnnnnnnnnnnnnnnnnnnnnnnnnnnnnnnnnnnnnnnnnnnnnnnnnnnnnnnnnnnnnnnnnnnnnnnnnnnnnnnnnnnnnnnnnnnnnnnnnnnnnnnnnnnnnnnnnnnnnnnnnnnnnnnnnnnnnnnnnnnnnnnnnnnnnnnnnnnnnnnnnnnnnnnnnnnnnnnnnnnnnnnnnnnnnnnnnnnnnnnnnnnnnnnnnnnnnnnnnnnnnnnnnnnnnnnnnnnnnnnnnnnnnnnnnnnnnnnnnnnnnnnnnnnnnnnnnnnnnnnnnnnnnnnnnnnnnnnnnnnnnnnnnnnnnnnnnnnnnnnnnnnnnnnnnnnnnnnnnnnnnnnnnnnnnnnnnnnnnnnnnnnnnnnnnnnnnnnnnnnnnnnnnnnnnnnnnnnnnnnnnnnnnnnnnnnnnnnnnnnnnnnnnnnnnnnnnnnnnnnnnnnnnnnnnnnnnnnnnnnnnnnnnnnnnnnnnnnnnnnnnnnnnnnnnnnnnnnnnnnnnnnnnnnnnnnnnnnnnnnnnnnnnnnnnnnnnnnnnnnnnnnnnnnnnnnnnnnnnnnnnnnnnnnnnnnnnnnnnnnnnnnnnnnnnnnnnnnnnnnnnnnnnnnnnnnnnnnnnnnnnnnnnnnnnnnnnnnnnnnnnnnnnnnnnnnnnnnnnnnnnnnnnnnnnnnnnnnnnnnnnnnnnnnnnnnnnnnnnnnnnnnnnnnnnnnnnnnnnnnnnnnnnnnnnnnnnnnnnnnnnnnnnnnnnnnnnnnnnnnnnnnnnnnnnnnnnnnnnnnnnnnnnnnnnnnnnnnnnnnnnnnnnnnnnnnnnnnnnnnnnnnnnnnnnnnnnnnnnnnnnnnnnnnnnnnnnnnnnnnnnnnnnnnnnnnnnnnnnnnnnnnnnnnnnnnnnnnnnnnnnnnnnnnnnnnnnnnnnnnnnnnnnnnnnnnnnnnnnnnnnnnnnnnnnnnnnnnnnnnnnnnnnnnnnnnnnnnnnnnnnnnnnnnnnnnnnnnnnnnnnnnnnnnnnnnnnnnnnnnnnnnnnnnnnnnnnnnnnnnnnnnnnnnnnnnnnnnnnnnnnnnnnnnnnnnnnnnnnnnnnnnnnnnnnnnnnnnnnnnnnnnnnnnnnnnnnnnnnnnnnnnnnnnnnnnnnnnnnnnnnnnnnnnnnnnnnnnnnnnnnnnnnnnnnnnnnnnnnnnnnnnnnnnnnnnnnnnnnnnnnnnnnnnnnnnnnnnnnnnnnnnnnnnnnnnnnnnnnnnnnnnnnnnnnnnnnnnnnnnnnnnnnnnnnnnnnnnnnnnnnnnnnnnnnnnnnnnnnnnnnnnnnnnnnnnnnnnnnnnnnnnnnnnnnnnnnnnnnnnnnnnnnnnnnnnnnnnnnnnnnnnnnnnnnnnnnnnnnnnnnnnnnnnnnnnnnnnnnnnnnnnnnnnnnnnnnnnnnnnnnnnnnnnnnnnnnnnnnnnnnnnnnnnnnnnnnnnnnnnnnnnnnnnnnnnnnnnnnnnnnnnnnnnnnnnnnnnnnnnnnnnnnnnnnnnnnnnnnnnnnnnnnnnnnnnnnnnnnnnnnnnnnnnnnnnnnnnnnnnnnnnnnnnnnnnnnnnnnnnnnnnnnnnnnnnnnnnnnnnnnnnnnnnnnnnnnnnnnnnnnnnnnnnnnnnnnnnnnnnnnnnnnnnnnnnnnnnnnnnnnnnnnnnnnnnnnnnnnnnnnnnnnnnnnnnnnnnnnnnnnnnnnnnnnnnnnnnnnnnnnnnnnnnnnnnnnnnnnnnnnnnnnnnnnnnnnnnnnnnnnnnnnnnnnnnnnnnnnnnnnnnnnnnnnnnnnnnnnnnnnnnnnnnnnnnnnnnnnnnnnnnnnnnnnnnnnnnnnnnnnnnnnnnnnnnnnnnnnnnnnnnnnnnnnnnnnnnnnnnnnnnnnnnnnnnnnnnnnnnnnnnnnnnnnnnnnnnnnnnnnnnnnnnnnnnnnnnnnnnnnnnnnnnnnnnnnnnnnnnnnnnnnnnnnnnnnnnnnnnnnnnnnnnnnnnnnnnnnnnnnnnnnnnnnnnnnnnnnnnnnnnnnnnnnnnnnnnnnnnnnnnnnnnnnnnnnnnnnnnnnnnnnnnnnnnnnnnnnnnnnnnnnnnnnnnnnnnnnnnnnnnnnnnnnnnnnnnnnnnnnnnnnnnnnnnnnnnnnnnnnnnnnnnnnnnnnnnnnnnnnnnnnnnnnnnnnnnnnnnnnnnnnnnnnnnnnnnnnnnnnnnnnnnnnnnnnnnnnnnnnnnnnnnnnnnnnnnnnnnnnnnnnnnnnnnnnnnnnnnnnnnnnnnnnnnnnnnnnnnnnnnnnnnnnnnnnnnnnnnnnnnnnnnnnnnnnnnnnnnnnnnnnnnnnnnnnnnnnnnnnnnnnnnnnnnnnnnnnnnnnnnnnnnnnnnnnnnnnnnnnnnnnnnnnnnnnnnnnnnnnnnnnnnnnnnnnnnnnnnnnnnnnnnnnnnnnnnnnnnnnnnnnnnnnnnnnnnnnnnnnnnnnnnnnnnnnnnnnnnnnnnnnnnnnnnnnnnnnnnnnnnnnnnnnnnnnnnnnnnnnnnnnnnnnnnnnnnnnnnnnnnnnnnnnnnnnnnnnnnnnnnnnnnnnnnnnnnnnnnnnnnnnnnnnnnnnnnnnnnnnnnnnnnnnnnnnnnnnnnnnnnnnnnnnnnnnnnnnnnnnnnnnnnnnnnnnnnnnnnnnnnnnnnnnnnnnnnnnnnnnnnnnnnnnnnnnnnnnnnnnnnnnnnnnnnnnnnnnnnnnnnnnnnnnnnnnnnnnnnnnnnnnnnnnnnnnnnnnnnnnnnnnnnnnnnnnnnnnnnnnnnnnnnnnnnnnnnnnnnnnnnnnnnnnnnnnnnnnnnnnnnnnnnnnnnnnnnnnnnnnnnnnnnnnnnnnnnnnnnnnnnnnnnnnnnnnnnnnnnnnnnnnnnnnnnnnnnnnnnnnnnnnnnnnnnnnnnnnnnnnnnnnnnnnnnnnnnnnnnnnnnnnnnnnnnnnnnnnnnnnnnnnnnnnnnnnnnnnnnnnnnnnnnnnnnnnnnnnnnnnnnnnnnnnnnnnnnnnnnnnnnnnnnnnnnnnnnnnnnnnnnnnnnnnnnnnnnnnnnnnnnnnnnnnnnnnnnnnnnnnnnnnnnnnnnnnnnnnnnnnnnnnnnnnnnnnnnnnnnnnnnnnnnnnnnnnnnnnnnnnnnnnnnnnnnnnnnnnnnnnnnnnnnnnnnnnnnnnnnnnnnnnnnnnnnnnnnnnnnnnnnnnnnnnnnnnnnnnnnnnnnnnnnnnnnnnnnnnnnnnnnnnnnnnnnnnnnnnnnnnnnnnnnnnnnnnnnnnnnnnnnnnnnnnnnnnnnnnnnnnnnnnnnnnnnnnnnnnnnnnnnnnnnnnnnnnnnnnnnnnnnnnnnnnnnnnnnnnnnnnnnnnnnnnnnnnnnnnnnnnnnnnnnnnnnnnnnnnnnnnnnnnnnnnnnnnnnnnnnnnnnnnnnnnnnnnnnnnnnnnnnnnnnnnnnnnnnnnnnnnnnnnnnnnnnnnnnnnnnnnnnnnnnnnnnnnnnnnnnnnnnnnnnnnnnnnnnnnnnnnnnnnnnnnnnnnnnnnnnnnnnnnnnnnnnnnnnnnnnnnnnnnnnnnnnnnnnnnnnnnnnnnnnnnnnnnnnnnnnnnnnnnnnnnnnnnnnnnnnnnnnnnnnnnnnnnnnnnnnnnnnnnnnnnnnnnnnnnnnnnnnnnnnnnnnnnnnnnnnnnnnnnnnnnnnnnnnnnnnnnnnnnnnnnnnnnnnnnnnnnnnnnnnnnnnnnnnnnnnnnnnnnnnnnnnnnnnnnnnnnnnnnnnnnnnnnnnnnnnnnnnnnnnnnnnnnnnnnnnnnnnnnnnnnnnnnnnnnnnnnnnnnnnnnnnnnnnnnnnnnnnnnnnnnnnnnnnnnnnnnnnnnnnnnnnnnnnnnnnnnnnnnnnnnnnnnnnnnnnnnnnnnnnnnnnnnnnnnnnnnnnnnnnnnnnnnnnnnnnnnnnnnnnnnnnnnnnnnnnnnnnnnnnnnnnnnnnnnnnnnnnnnnnnnnnnnnnnnnnnnnnnnnnnnnnnnnnnnnnnnnnnnnnnnnnnnnnnnnnnnnnnnnnnnnnnnnnnnnnnnnnnnnnnnnnnnnnnnnnnnnnnnnnnnnnnnnnnnnnnnnnnnnnnnnnnnnnnnnnnnnnnnnnnnnnnnnnnnnnnnnnnnnnnnnnnnnnnnnnnnnnnnnnnnnnnnnnnnnnnnnnnnnnnnnnnnnnnnnnnnnnnnnnnnnnnnnnnnnnnnnnnnnnnnnnnnnnnnnnnnnnnnnnnnnnnnnnnnnnnnnnnnnnnnnnnnnnnnnnnnnnnnnnnnnnnnnnnnnnnnnnnnnnnnnnnnnnnnnnnnnnnnnnnnnnnnnnnnnnnnnnnnnnnnnnnnnnnnnnnnnnnnnnnnnnnnnnnnnnnnnnnnnnnnnnnnnnnnnnnnnnnnnnnnnnnnnnnnnnnnnnnnnnnnnnnnnnnnnnnnnnnnnnnnnnnnnnnnnnnnnnnnnnnnnnnnnnnnnnnnnnnnnnnnnnnnnnnnnnnnnnnnnnnnnnnnnnnnnnnnnnnnnnnnnnnnnnnnnnnnnnnnnnnnnnnnnnnnnnnnnnnnnnnnnnnnnnnnnnnnnnnnnnnnnnnnnnnnnnnnnnnnnnnnnnnnnnnnnnnnnnnnnnnnnnnnnnnnnnnnnnnnnnnnnnnnnnnnnnnnnnnnnnnnnnnnnnnnnnnnnnnnnnnnnnnnnnnnnnnnnnnnnnnnnnnnnnnnnnnnnnnnnnnnnnnnnnnnnnnnnnnnnnnnnnnnnnnnnnnnnnnnnnnnnnnnnnnnnnnnnnnnnnnnnnnnnnnnnnnnnnnnnnnnnnnnnnnnnnnnnnnnnnnnnnnnnnnnnnnnnnnnnnnnnnnnnnnnnnnnnnnnnnnnnnnnnnnnnnnnnnnnnnnnnnnnnnnnnnnnnnnnnnnnnnnnnnnnnnnnnnnnnnnnnnnnnnnnnnnnnnnnnnnnnnnnnnnnnnnnnnnnnnnnnnnnnnnnnnnnnnnnnnnnnnnnnnnnnnnnnnnnnnnnnnnnnnnnnnnnnnnnnnnnnnnnnnnnnnnnnnnnnnnnnnnnnnnnnnnnnnnnnnnnnnnnnnnnnnnnnnnnnnnnnnnnnnnnnnnnnnnnnnnnnnnnnnnnnnnnnnnnnnnnnnnnnnnnnnnnnnnnnnnnnnnnnnnnnnnnnnnnnnnnnnnnnnnnnnnnnnnnnnnnnnnnnnnnnnnnnnnnnnnnnnnnnnnnnnnnnnnnnnnnnnnnnnnnnnnnnnnnnnnnnnnnnnnnnnnnnnnnnnnnnnnnnnnnnnnnnnnnnnnnnnnnnnnnnnnnnnnnnnnnnnnnnnnnnnnnnnnnnnnnnnnnnnnnnnnnnnnnnnnnnnnnnnnnnnnnnnnnnnnnnnnnnnnnnnnnnnnnnnnnnnnnnnnnnnnnnnnnnnnnnnnnnnnnnnnnnnnnnnnnnnnnnnnnnnnnnnnnnnnnnnnnnnnnnnnnnnnnnnnnnnnnnnnnnnnnnnnnnnnnnnnnnnnnnnnnnnnnnnnnnnnnnnnnnnnnnnnnnnnnnnnnnnnnnnnnnnnnnnnnnnnnnnnnnnnnnnnnnnnnnnnnnnnnnnnnnnnnnnnnnnnnnnnnnnnnnnnnnnnnnnnnnnnnnnnnnnnnnnnnnnnnnnnnnnnnnnnnnnnnnnnnnnnnnnnnnnnnnnnnnnnnnnnnnnnnnnnnnnnnnnnnnnnnnnnnnnnnnnnnnnnnnnnnnnnnnnnnnnnnnnnnnnnnnnnnnnnnnnnnnnnnnnnnnnnnnnnnnnnnnnnnnnnnnnnnnnnnnnnnnnnnnnnnnnnnnnnnnnnnnnnnnnnnnnnnnnnnnnnnnnnnnnnnnnnnnnnnnnnnnnnnnnnnnnnnnnnnnnnnnnnnnnnnnnnnnnnnnnnnnnnnnnnnnnnnnnnnnnnnnnnnnnnnnnnnnnnnnnnnnnnnnnnnnnnnnnnnnnnnnnnnnnnnnnnnnnnnnnnnnnnnnnnnnnnnnnnnnnnnnnnnnnnnnnnnnnnnnnnnnnnnnnnnnnnnnnnnnnnnnnnnnnnnnnnnnnnnnnnnnnnnnnnnnnnnnnnnnnnnnnnnnnnnnnnnnnnnnnnnnnnnnnnnnnnnnnnnnnnnnnnnnnnnnnnnnnnnnnnnnnnnnnnnnnnnnnnnnnnnnnnnnnnnnnnnnnnnnnnnnnnnnnnnnnnnnnnnnnnnnnnnnnnnnnnnnnnnnnnnnnnnnnnnnnnnnnnnnnnnnnnnnnnnnnnnnnnnnnnnnnnnnnnnnnnnnnnnnnnnnnnnnnnnnnnnnnnnnnnnnnnnnnnnnnnnnnnnnnnnnnnnnnnnnnnnnnnnnnnnnnnnnnnnnnnnnnnnnnnnnnnnnnnnnnnnnnnnnnnnnnnnnnnnnnnnnnnnnnnnnnnnnnnnnnnnnnnnnnnnnnnnnnnnnnnnnnnnnnnnnnnnnnnnnnnnnnnnnnnnnnnnnnnnnnnnnnnnnnnnnnnnnnnnnnnnnnnnnnnnnnnnnnnnnnnnnnnnnnnnnnnnnnnnnnnnnnnnnnnnnnnnnnnnnnnnnnnnnnnnnnnnnnnnnnnnnnnnnnnnnnnnnnnnnnnnnnnnnnnnnnnnnnnnnnnnnnnnnnnnnnnnnnnnnnnnnnnnnnnnnnnnnnnnnnnnnnnnnnnnnnnnnnnnnnnnnnnnnnnnnnnnnnnnnnnnnnnnnnnnnnnnnnnnnnnnnnnnnnnnnnnnnnnnnnnnnnnnnnnnnnnnnnnnnnnnnnnnnnnnnnnnnnnnnnnnnnnnnnnnnnnnnnnnnnnnnnnnnnnnnnnnnnnnnnnnnnnnnnnnnnnnnnnnnnnnnnnnnnnnnnnnnnnnnnnnnnnnnnnnnnnnnnnnnnnnnnnnnnnnnnnnnnnnnnnnnnnnnnnnnnnnnnnnnnnnnnnnnnnnnnnnnnnnnnnnnnnnnnnnnnnnnnnnnnnnnnnnnnnnnnnnnnnnnnnnnnnnnnnnnnnnnnnnnnnnnnnnnnnnnnnnnnnnnnnnnnnnnnnnnnnnnnnnnnnnnnnnnnnnnnnnnnnnnnnnnnnnnnnnnnnnnnnnnnnnnnnnnnnnnnnnnnnnnnnnnnnnnnnnnnnnnnnnnnnnnnnnnnnnnnnnnnnnnnnnnnnnnnnnnnnnnnnnnnnnnnnnnnnnnnnnnnnnnnnnnnnnnnnnnnnnnnnnnnnnnnnnnnnnnnnnnnnnnnnnnnnnnnnnnnnnnnnnnnnnnnnnnnnnnnnnnnnnnnnnnnnnnnnnnnnnnnnnnnnnnnnnnnnnnnnnnnnnnnnnnnnnnnnnnnnnnnnnnnnnnnnnnnnnnnnnnnnnnnnnnnnnnnnnnnnnnnnnnnnnnnnnnnnnnnnnnnnnnnnnnnnnnnnnnnnnnnnnnnnnnnnnnnnnnnnnnnnnnnnnnnnnnnnnnnnnnnnnnnnnnnnnnnnnnnnnnnnnnnnnnnnnnnnnnnnnnnnnnnnnnnnnnnnnnnnnnnnnnnnnnnnnnnnnnnnnnnnnnnnnnnnnnnnnnnnnnnnnnnnnnnnnnnnnnnnnnnnnnnnnnnnnnnnnnnnnnnnnnnnnnnnnnnnnnnnnnnnnnnnnnnnnnnnnnnnnnnnnnnnnnnnnnnnnnnnnnnnnnnnnnnnnnnnnnnnnnnnnnnnnnnnnnnnnnnnnnnnnnnnnnnnnnnnnnnnnnnnnnnnnnnnnnnnnnnnnnnnnnnnnnnnnnnnnnnnnnnnnnnnnnnnnnnnnnnnnnnnnnnnnnnnnnnnnnnnnnnnnnnnnnnnnnnnnnnnnnnnnnnnnnnnnnnnnnnnnnnnnnnnnnnnnnnnnnnnnnnnnnnnnnnnnnnnnnnnnnnnnnnnnnnnnnnnnnnnnnnnnnnnnnnnnnnnnnnnnnnnnnnnnnnnnnnnnnnnnnnnnnnnnnnnnnnnnnnnnnnnnnnnnnnnnnnnnnnnnnnnnnnnnnnnnnnnnnnnnnnnnnnnnnnnnnnnnnnnnnnnnnnnnnnnnnnnnnnnnnnnnnnnnnnnnnnnnnnnnnnnnnnnnnnnnnnnnnnnnnnnnnnnnnnnnnnnnnnnnnnnnnnnnnnnnnnnnnnnnnnnnnnnnnnnnnnnnnnnnnnnnnnnnnnnnnnnnnnnnnnnnnnnnnnnnnnnnnnnnnnnnnnnnnnnnnnnnnnnnnnnnnnnnnnnnnnnnnnnnnnnnnnnnnnnnnnnnnnnnnnnnnnnnnnnnnnnnnnnnnnnnnnnnnnnnnnnnnnnnnnnnnnnnnnnnnnnnnnnnnnnnnnnnnnnnnnnnnnnnnnnnnnnnnnnnnnnnnnnnnnnnnnnnnnnnnnnnnnnnnnnnnnnnnnnnnnnnnnnnnnnnnnnnnnnnnnnnnnnnnnnnnnnnnnnnnnnnnnnnnnnnnnnnnnnnnnnnnnnnnnnnnnnnnnnnnnnnnnnnnnnnnnnnnnnnnnnnnnnnnnnnnnnnnnnnnnnnnnnnnnnnnnnnnnnnnnnnnnnnnnnnnnnnnnnnnnnnnnnnnnnnnnnnnnnnnnnnnnnnnnnnnnnnnnnnnnnnnnnnnnnnnnnnnnnnnnnnnnnnnnnnnnnnnnnnnnnnnnnnnnnnnnnnnnnnnnnnnnnnnnnnnnnnnnnnnnnnnnnnnnnnnnnnnnnnnnnnnnnnnnnnnnnnnnnnnnnnnnnnnnnnnnnnnnnnnnnnnnnnnnnnnnnnnnnnnnnnnnnnnnnnnnnnnnnnnnnnnnnnnnnnnnnnnnnnnnnnnnnnnnnnnnnnnnnnnnnnnnnnnnnnnnnnnnnnnnnnnnnnnnnnnnnnnnnnnnnnnnnnnnnnnnnnnnnnnnnnnnnnnnnnnnnnnnnnnnnnnnnnnnnnnnnnnnnnnnnnnnnnnnnnnnnnnnnnnnnnnnnnnnnnnnnnnnnnnnnnnnnnnnnnnnnnnnnnnnnnnnnnnnnnnnnnnnnnnnnnnnnnnnnnnnnnnnnnnnnnnnnnnnnnnnnnnnnnnnnnnnnnnnnnnnnnnnnnnnnnnnnnnnnnnnnnnnnnnnnnnnnnnnnnnnnnnnnnnnnnnnnnnnnnnnnnnnnnnnnnnnnnnnnnnnnnnnnnnnnnnnnnnnnnnnnnnnnnnnnnnnnnnnnnnnnnnnnnnnnnnnnnnnnnnnnnnnnnnnnnnnnnnnnnnnnnnnnnnnnnnnnnnnnnnnnnnnnnnnnnnnnnnnnnnnnnnnnnnnnnnnnnnnnnnnnnnnnnnnnnnnnnnnnnnnnnnnnnnnnnnnnnnnnnnnnnnnnnnnnnnnnnnnnnnnnnnnnnnnnnnnnnnnnnnnnnnnnnnnnnnnnnnnnnnnnnnnnnnnnnnnnnnnnnnnnnnnnnnnnnnnnnnnnnnnnnnnnnnnnnnnnnnnnnnnnnnnnnnnnnnnnnnnnnnnnnnnnnnnnnnnnnnnnnnnnnnnnnnnnnnnnnnnnnnnnnnnnnnnnnnnnnnnnnnnnnnnnnnnnnnnnnnnnnnnnnnnnnnnnnnnnnnnnnnnnnnnnnnnnnnnnnnnnnnnnnnnnnnnnnnnnnnnnnnnnnnnnnnnnnnnnnnnnnnnnnnnnnnnnnnnnnnnnnnnnnnnnnnnnnnnnnnnnnnnnnnnnnnnnnnnnnnnnnnnnnnnnnnnnnnnnnnnnnnnnnnnnnnnnnnnnnnnnnnnnnnnnnnnnnnnnnnnnnnnnnnnnnnnnnnnnnnnnnnnnnnnnnnnnnnnnnnnnnnnnnnnnnnnnnnnnnnnnnnnnnnnnnnnnnnnnnnnnnnnnnnnnnnnnnnnnnnnnnnnnnnnnnnnnnnnnnnnnnnnnnnnnnnnnnnnnnnnnnnnnnnnnnnnnnnnnnnnnnnnnnnnnnnnnnnnnnnnnnnnnnnnnnnnnnnnnnnnnnnnnnnnnnnnnnnnnnnnnnnnnnnnnnnnnnnnnnnnnnnnnnnnnnnnnnnnnnnnnnnnnnnnnnnnnnnnnnnnnnnnnnnnnnnnnnnnnnnnnnnnnnnnnnnnnnnnnnnnnnnnnnnnnnnnnnnnnnnnnnnnnnnnnnnnnnnnnnnnnnnnnnnnnnnnnnnnnnnnnnnnnnnnnnnnnnnnnnnnnnnnnnnnnnnnnnnnnnnnnnnnnnnnnnnnnnnnnnnnnnnnnnnnnnnnnnnnnnnnnnnnnnnnnnnnnnnnnnnnnnnnnnnnnnnnnnnnnnnnnnnnnnnnnnnnnnnnnnnnnnnnnnnnnnnnnnnnnnnnnnnnnnnnnnnnnnnnnnnnnnnnnnnnnnnnnnnnnnnnnnnnnnnnnnnnnnnnnnnnnnnnnnnnnnnnnnnnnnnnnnnnnnnnnnnnnnnnnnnnnnnnnnnnnnnnnnnnnnnnnnnnnnnnnnnnnnnnnnnnnnnnnnnnnnnnnnnnnnnnnnnnnnnnnnnnnnnnnnnnnnnnnnnnnnnnnnnnnnnnnnnnnnnnnnnnnnnnnnnnnnnnnnnnnnnnnnnnnnnnnnnnnnnnnnnnnnnnnnnnnnnnnnnnnnnnnnnnnnnnnnnnnnnnnnnnnnnnnnnnnnnnnnnnnnnnnnnnnnnnnnnnnnnnnnnnnnnnnnnnnnnnnnnnnnnnnnnnnnnnnnnnnnnnnnnnnnnnnnnnnnnnnnnnnnnnnnnnnnnnnnnnnnnnnnnnnnnnnnnnnnnnnnnnnnnnnnnnnnnnnnnnnnnnnnnnnnnnnnnnnnnnnnnnnnnnnnnnnnnnnnnnnnnnnnnnnnnnnnnnnnnnnnnnnnnnnnnnnnnnnnnnnnnnnnnnnnnnnnnnnnnnnnnnnnnnnnnnnnnnnnnnnnnnnnnnnnnnnnnnnnnnnnnnnnnnnnnnnnnnnnnnnnnnnnnnnnnnnnnnnnnnnnnnnnnnnnnnnnnnnnnnnnnnnnnnnnnnnnnnnnnnnnnnnnnnnnnnnnnnnnnnnnnnnnnnnnnnnnnnnnnnnnnnnnnnnnnnnnnnnnnnnnnnnnnnnnnnnnnnnnnnnnnnnnnnnnnnnnnnnnnnnnnnnnnnnnnnnnnnnnnnnnnnnnnnnnnnnnnnnnnnnnnnnnnnnnnnnnnnnnnnnnnnnnnnnnnnnnnnnnnnnnnnnnnnnnnnnnnnnnnnnnnnnnnnnnnnnnnnnnnnnnnnnnnnnnnnnnnnnnnnnnnnnnnnnnnnnnnnnnnnnnnnnnnnnnnnnnnnnnnnnnnnnnnnnnnnnnnnnnnnnnnnnnnnnnnnnnnnnnnnnnnnnnnnnnnnnnnnnnnnnnnnnnnnnnnnnnnnnnnnnnnnnnnnnnnnnnnnnnnnnnnnnnnnnnnnnnnnnnnnnnnnnnnnnnnnnnnnnnnnnnnnnnnnnnnnnnnnnnnnnnnnnnnnnnnnnnnnnnnnnnnnnnnnnnnnnnnnnnnnnnnnnnnnnnnnnnnnnnnnnnnnnnnnnnnnnnnnnnnnnnnnnnnnnnnnnnnnnnnnnnnnnnnnnnnnnnnnnnnnnnnnnnnnnnnnnnnnnnnnnnnnnnnnnnnnnnnnnnnnnnnnnnnnnnnnnnnnnnnnnnnnnnnnnnnnnnnnnnnnnnnnnnnnnnnnnnnnnnnnnnnnnnnnnnnnnnnnnnnnnnnnnnnnnnnnnnnnnnnnnnnnnnnnnnnnnnnnnnnnnnnnnnnnnnnnnnnnnnnnnnnnnnnnnnnnnnnnnnnnnnnnnnnnnnnnnnnnnnnnnnnnnnnnnnnnnnnnnnnnnnnnnnnnnnnnnnnnnnnnnnnnnnnnnnnnnnnnnnnnnnnnnnnnnnnnnnnnnnnnnnnnnnnnnnnnnnnnnnnnnnnnnnnnnnnnnnnnnnnnnnnnnnnnnnnnnnnnnnnnnnnnnnnnnnnnnnnnnnnnnnnnnnnnnnnnnnnnnnnnnnnnnnnnnnnnnnnnnnnnnnnnnnnnnnnnnnnnnnnnnnnnnnnnnnnnnnnnnnnnnnnnnnnnnnnnnnnnnnnnnnnnnnnnnnnnnnnnnnnnnnnnnnnnnnnnnnnnnnnnnnnnnnnnnnnnnnnnnnnnnnnnnnnnnnnnnnnnnnnnnnnnnnnnnnnnnnnnnnnnnnnnnnnnnnnnnnnnnnnnnnnnnnnnnnnnnnnnnnnnnnnnnnnnnnnnnnnnnnnnnnnnnnnnnnnnnnnnnnnnnnnnnnnnnnnnnnnnnnnnnnnnnnnnnnnnnnnnnnnnnnnnnnnnnnnnnnnnnnnnnnnnnnnnnnnnnnnnnnnnnnnnnnnnnnnnnnnnnnnnnnnnnnnnnnnnnnnnnnnnnnnnnnnnnnnnnnnnnnnnnnnnnnnnnnnnnnnnnnnnnnnnnnnnnnnnnnnnnnnnnnnnnnnnnnnnnnnnnnnnnnnnnnnnnnnnnnnnnnnnnnnnnnnnnnnnnnnnnnnnnnnnnnnnnnnnnnnnnnnnnnnnnnnnnnnnnnnnnnnnnnnnnnnnnnnnnnnnnnnnnnnnnnnnnnnnnnnnnnnnnnnnnnnnnnnnnnnnnnnnnnnnnnnnnnnnnnnnnnnnnnnnnnnnnnnnnnnnnnnnnnnnnnnnnnnnnnnnnnnnnnnnnnnnnnnnnnnnnnnnnnnnnnnnnnnnnnnnnnnnnnnnnnnnnnnnnnnnnnnnnnnnnnnnnnnnnnnnnnnnnnnnnnnnnnnnnnnnnnnnnnnnnnnnnnnnnnnnnnnnnnnnnnnnnnnnnnnnnnnnnnnnnnnnnnnnnnnnnnnnnnnnnnnnnnnnnnnnnnnnnnnnnnnnnnnnnnnnnnnnnnnnnnnnnnnnnnnnnnnnnnnnnnnnnnnnnnnnnnnnnnnnnnnnnnnnnnnnnnnnnnnnnnnnnnnnnnnnnnnnnnnnnnnnnnnnnnnnnnnnnnnnnnnnnnnnnnnnnnnnnnnnnnnnnnnnnnnnnnnnnnnnnnnnnnnnnnnnnnnnnnnnnnnnnnnnnnnnnnnnnnnnnnnnnnnnnnnnnnnnnnnnnnnnnnnnnnnnnnnnnnnnnnnnnnnnnnnnnnnnnnnnnnnnnnnnnnnnnnnnnnnnnnnnnnnnnnnnnnnnnnnnnnnnnnnnnnnnnnnnnnnnnnnnnnnnnnnnnnnnnnnnnnnnnnnnnnnnnnnnnnnnnnnnnnnnnnnnnnnnnnnnnnnnnnnnnnnnnnnnnnnnnnnnnnnnnnnnnnnnnnnnnnnnnnnnnnnnnnnnnnnnnnnnnnnnnnnnnnnnnnnnnnnnnnnnnnnnnnnnnnnnnnnnnnnnnnnnnnnnnnnnnnnnnnnnnnnnnnnnnnnnnnnnnnnnnnnnnnnnnnnnnnnnnnnnnnnnnnnnnnnnnnnnnnnnnnnnnnnnnnnnnnnnnnnnnnnnnnnnnnnnnnnnnnnnnnnnnnnnnnnnnnnnnnnnnnnnnnnnnnnnnnnnnnnnnnnnnnnnnnnnnnnnnnnnnnnnnnnnnnnnnnnnnnnnnnnnnnnnnnnnnnnnnnnnnnnnnnnnnnnnnnnnnnnnnnnnnnnnnnnnnnnnnnnnnnnnnnnnnnnnnnnnnnnnnnnnnnnnnnnnnnnnnnnnnnnnnnnnnnnnnnnnnnnnnnnnnnnnnnnnnnnnnnnnnnnnnnnnnnnnnnnnnnnnnnnnnnnnnnnnnnnnnnnnnnnnnnnnnnnnnnnnnnnnnnnnnnnnnnnnnnnnnnnnnnnnnnnnnnnnnnnnnnnnnnnnnnnnnnnnnnnnnnnnnnnnnnnnnnnnnnnnnnnnnnnnnnnnnnnnnnnnnnnnnnnnnnnnnnnnnnnnnnnnnnnnnnnnnnnnnnnnnnnnnnnnnnnnnnnnnnnnnnnnnnnnnnnnnnnnnnnnnnnnnnnnnnnnnnnnnnnnnnnnnnnnnnnnnnnnnnnnnnnnnnnnnnnnnnnnnnnnnnnnnnnnnnnnnnnnnnnnnnnnnnnnnnnnnnnnnnnnnnnnnnnnnnnnnnnnnnnnnnnnnnnnnnnnnnnnnnnnnnnnnnnnnnnnnnnnnnnnnnnnnnnnnnnnnnnnnnnnnnnnnnnnnnnnnnnnnnnnnnnnnnnnnnnnnnnnnnnnnnnnnnnnnnnnnnnnnnnnnnnnnnnnnnnnnnnnnnnnnnnnnnnnnnnnnnnnnnnnnnnnnnnnnnnnnnnnnnnnnnnnnnnnnnnnnnnnnnnnnnnnnnnnnnnnnnnnnnnnnnnnnnnnnnnnnnnnnnnnnnnnnnnnnnnnnnnnnnnnnnnnnnnnnnnnnnnnnnnnnnnnnnnnnnnnnnnnnnnnnnnnnnnnnnnnnnnnnnnnnnnnnnnnnnnnnnnnnnnnnnnnnnnnnnnnnnnnnnnnnnnnnnnnnnnnnnnnnnnnnnnnnnnnnnnnnnnnnnnnnnnnnnnnnnnnnnnnnnnnnnnnnnnnnnnnnnnnnnnnnnnnnnnnnnnnnnnnnnnnnnnnnnnnnnnnnnnnnnnnnnnnnnnnnnnnnnnnnnnnnnnnnnnnnnnnnnnnnnnnnnnnnnnnnnnnnnnnnnnnnnnnnnnnnnnnnnnnnnnnnnnnnnnnnnnnnnnnnnnnnnnnnnnnnnnnnnnnnnnnnnnnnnnnnnnnnnnnnnnnnnnnnnnnnnnnnnnnnnnnnnnnnnnnnnnnnnnnnnnnnnnnnnnnnnnnnnnnnnnnnnnnnnnnnnnnnnnnnnnnnnnnnnnnnnnnnnnnnnnnnnnnnnnnnnnnnnnnnnnnnnnnnnnnnnnnnnnnnnnnnnnnnnnnnnnnnnnnnnnnnnnnnnnnnnnnnnnnnnnnnnnnnnnnnnnnnnnnnnnnnnnnnnnnnnnnnnnnnnnnnnnnnnnnnnnnnnnnnnnnnnnnnnnnnnnnnnnnnnnnnnnnnnnnnnnnnnnnnnnnnnnnnnnnnnnnnnnnnnnnnnnnnnnnnnnnnnnnnnnnnnnnnnnnnnnnnnnnnnnnnnnnnnnnnnnnnnnnnnnnnnnnnnnnnnnnnnnnnnnnnnnnnnnnnnnnnnnnnnnnnnnnnnnnnnnnnnnnnnnnnnnnnnnnnnnnnnnnnnnnnnnnnnnnnnnnnnnnnnnnnnnnnnnnnnnnnnnnnnnnnnnnnnnnnnnnnnnnnnnnnnnnnnnnnnnnnnnnnnnnnnnnnnnnnnnnnnnnnnnnnnnnnnnnnnnnnnnnnnnnnnnnnnnnnnnnnnnnnnnnnnnnnnnnnnnnnnnnnnnnnnnnnnnnnnnnnnnnnnnnnnnnnnnnnnnnnnnnnnnnnnnnnnnnnnnnnnnnnnnnnnnnnnnnnnnnnnnnnnnnnnnnnnnnnnnnnnnnnnnnnnnnnnnnnnnnnnnnnnnnnnnnnnnnnnnnnnnnnnnnnnnnnnnnnnnnnnnnnnnnnnnnnnnnnnnnnnnnnnnnnnnnnnnnnnnnnnnnnnnnnnnnnnnnnnnnnnnnnnnnnnnnnnnnnnnnnnnnnnnnnnnnnnnnnnnnnnnnnnnnnnnnnnnnnnnnnnnnnnnnnnnnnnnnnnnnnnnnnnnnnnnnnnnnnnnnnnnnnnnnnnnnnnnnnnnnnnnnnnnnnnnnnnnnnnnnnnnnnnnnnnnnnnnnnnnnnnnnnnnnnnnnnnnnnnnnnnnnnnnnnnnnnnnnnnnnnnnnnnnnnnnnnnnnnnnnnnnnnnnnnnnnnnnnnnnnnnnnnnnnnnnnnnnnnnnnnnnnnnnnnnnnnnnnnnnnnnnnnnnnnnnnnnnnnnnnnnnnnnnnnnnnnnnnnnnnnnnnnnnnnnnnnnnnnnnnnnnnnnnnnnnnnnnnnnnnnnnnnnnnnnnnnnnnnnnnnnnnnnnnnnnnnnnnnnnnnnnnnnnnnnnnnnnnnnnnnnnnnnnnnnnnnnnnnnnnnnnnnnnnnnnnnnnnnnnnnnnnnnnnnnnnnnnnnnnnnnnnnnnnnnnnnnnnnnnnnnnnnnnnnnnnnnnnnnnnnnnnnnnnnnnnnnnnnnnnnnnnnnnnnnnnnnnnnnnnnnnnnnnnnnnnnnnnnnnnnnnnnnnnnnnnnnnnnnnnnnnnnnnnnnnnnnnnnnnnnnnnnnnnnnnnnnnnnnnnnnnnnnnnnnnnnnnnnnnnnnnnnnnnnnnnnnnnnnnnnnnnnnnnnnnnnnnnnnnnnnnnnnnnnnnnnnnnnnnnnnnnnnnnnnnnnnnnnnnnnnnnnnnnnnnnnnnnnnnnnnnnnnnnnnnnnnnnnnnnnnnnnnnnnnnnnnnnnnnnnnnnnnnnnnnnnnnnnnnnnnnnnnnnnnnnnnnnnnnnnnnnnnnnnnnnnnnnnnnnnnnnnnnnnnnnnnnnnnnnnnnnnnnnnnnnnnnnnnnnnnnnnnnnnnnnnnnnnnnnnnnnnnnnnnnnnnnnnnnnnnnnnnnnnnnnnnnnnnnnnnnnnnnnnnnnnnnnnnnnnnnnnnnnnnnnnnnnnnnnnnnnnnnnnnnnnnnnnnnnnnnnnnnnnnnnnnnnnnnnnnnnnnnnnnnnnnnnnnnnnnnnnnnnnnnnnnnnnnnnnnnnnnnnnnnnnnnnnnnnnnnnnnnnnnnnnnnnnnnnnnnnnnnnnnnnnnnnnnnnnnnnnnnnnnnnnnnnnnnnnnnnnnnnnnnnnnnnnnnnnnnnnnnnnnnnnnnnnnnnnnnnnnnnnnnnnnnnnnnnnnnnnnnnnnnnnnnnnnnnnnnnnnnnnnnnnnnnnnnnnnnnnnnnnnnnnnnnnnnnnnnnnnnnnnnnnnnnnnnnnnnnnnnnnnnnnnnnnnnnnnnnnnnnnnnnnnnnnnnnnnnnnnnnnnnnnnnnnnnnnnnnnnnnnnnnnnnnnnnnnnnnnnnnnnnnnnnnnnnnnnnnnnnnnnnnnnnnnnnnnnnnnnnnnnnnnnnnnnnnnnnnnnnnnnnnnnnnnnnnnnnnnnnnnnnnnnnnnnnnnnnnnnnnnnnnnnnnnnnnnnnnnnnnnnnnnnnnnnnnnnnnnnnnnnnnnnnnnnnnnnnnnnnnnnnnnnnnnnnnnnnnnnnnnnnnnnnnnnnnnnnnnnnnnnnnnnnnnnnnnnnnnnnnnnnnnnnnnnnnnnnnnnnnnnnnnnnnnnnnnnnnnnnnnnnnnnnnnnnnnnnnnnnnnnnnnnnnnnnnnnnnnnnnnnnnnnnnnnnnnnnnnnnnnnnnnnnnnnnnnnnnnnnnnnnnnnnnnnnnnnnnnnnnnnnnnnnnnnnnnnnnnnnnnnnnnnnnnnnnnnnnnnnnnnnnnnnnnnnnnnnnnnnnnnnnnnnnnnnnnnnnnnnnnnnnnnnnnnnnnnnnnnnnnnnnnnnnnnnnnnnnnnnnnnnnnnnnnnnnnnnnnnnnnnnnnnnnnnnnnnnnnnnnnnnnnnnnnnnnnnnnnnnnnnnnnnnnnnnnnnnnnnnnnnnnnnnnnnnnnnnnnnnnnnnnnnnnnnnnnnnnnnnnnnnnnnnnnnnnnnnnnnnnnnnnnnnnnnnnnnnnnnnnnnnnnnnnnnnnnnnnnnnnnnnnnnnnnnnnnnnnnnnnnnnnnnnnnnnnnnnnnnnnnnnnnnnnnnnnnnnnnnnnnnnnnnnnnnnnnnnnnnnnnnnnnnnnnnnnnnnnnnnnnnnnnnnnnnnnnnnnnnnnnnnnnnnnnnnnnnnnnnnnnnnnnnnnnnnnnnnnnnnnnnnnnnnnnnnnnnnnnnnnnnnnnnnnnnnnnnnnnnnnnnnnnnnnnnnnnnnnnnnnnnnnnnnnnnnnnnnnnnnnnnnnnnnnnnnnnnnnnnnnnnnnnnnnnnnnnnnnnnnnnnnnnnnnnnnnnnnnnnnnnnnnnnnnnnnnnnnnnnnnnnnnnnnnnnnnnnnnnnnnnnnnnnnnnnnnnnnnnnnnnnnnnnnnnnnnnnnnnnnnnnnnnnnnnnnnnnnnnnnnnnnnnnnnnnnnnnnnnnnnnnnnnnnnnnnnnnnnnnnnnnnnnnnnnnnnnnnnnnnnnnnnnnnnnnnnnnnnnnnnnnnnnnnnnnnnnnnnnnnnnnnnnnnnnnnnnnnnnnnnnnnnnnnnnnnnnnnnnnnnnnnnnnnnnnnnnnnnnnnnnnnnnnnnnnnnnnnnnnnnnnnnnnnnnnnnnnnnnnnnnnnnnnnnnnnnnnnnnnnnnnnnnnnnnnnnnnnnnnnnnnnnnnnnnnnnnnnnnnnnnnnnnnnnnnnnnnnnnnnnnnnnnnnnnnnnnnnnnnnnnnnnnnnnnnnnnnnnnnnnnnnnnnnnnnnnnnnnnnnnnnnnnnnnnnnnnnnnnnnnnnnnnnnnnnnnnnnnnnnnnnnnnnnnnnnnnnnnnnnnnnnnnnnnnnnnnnnnnnnnnnnnnnnnnnnnnnnnnnnnnnnnnnnnnnnnnnnnnnnnnnnnnnnnnnnnnnnnnnnnnnnnnnnnnnnnnnnnnnnnnnnnnnnnnnnnnnnnnnnnnnnnnnnnnnnnnnnnnnnnnnnnnnnnnnnnnnnnnnnnnnnnnnnnnnnnnnnnnnnnnnnnnnnnnnnnnnnnnnnnnnnnnnnnnnnnnnnnnnnnnnnnnnnnnnnnnnnnnnnnnnnnnnnnnnnnnnnnnnnnnnnnnnnnnnnnnnnnnnnnnnnnnnnnnnnnnnnnnnnnnnnnnnnnnnnnnnnnnnnnnnnnnnnnnnnnnnnnnnnnnnnnnnnnnnnnnnnnnnnnnnnnnnnnnnnnnnnnnnnnnnnnnnnnnnnnnnnnnnnnnnnnnnnnnnnnnnnnnnnnnnnnnnnnnnnnnnnnnnnnnnnnnnnnnnnnnnnnnnnnnnnnnnnnnnnnnnnnnnnnnnnnnnnnnnnnnnnnnnnnnnnnnnnnnnnnnnnnnnnnnnnnnnnnnnnnnnnnnnnnnnnnnnnnnnnnnnnnnnnnnnnnnnnnnnnnnnnnnnnnnnnnnnnnnnnnnnnnnnnnnnnnnnnnnnnnnnnnnnnnnnnnnnnnnnnnnnnnnnnnnnnnnnnnnnnnnnnnnnnnnnnnnnnnnnnnnnnnnnnnnnnnnnnnnnnnnnnnnnnnnnnnnnnnnnnnnnnnnnnnnnnnnnnnnnnnnnnnnnnnnnnnnnnnnnnnnnnnnnnnnnnnnnnnnnnnnnnnnnnnnnnnnnnnnnnnnnnnnnnnnnnnnnnnnnnnnnnnnnnnnnnnnnnnnnnnnnnnnnnnnnnnnnnnnnnnnnnnnnnnnnnnnnnnnnnnnnnnnnnnnnnnnnnnnnnnnnnnnnnnnnnnnnnnnnnnnnnnnnnnnnnnnnnnnnnnnnnnnnnnnnnnnnnnnnnnnnnnnnnnnnnnnnnnnnnnnnnnnnnnnnnnnnnnnnnnnnnnnnnnnnnnnnnnnnnnnnnnnnnnnnnnnnnnnnnnnnnnnnnnnnnnnnnnnnnnnnnnnnnnnnnnnnnnnnnnnnnnnnnnnnnnnnnnnnnnnnnnnnnnnnnnnnnnnnnnnnnnnnnnnnnnnnnnnnnnnnnnnnnnnnnnnnnnnnnnnnnnnnnnnnnnnnnnnnnnnnnnnnnnnnnnnnnnnnnnnnnnnnnnnnnnnnnnnnnnnnnnnnnnnnnnnnnnnnnnnnnnnnnnnnnnnnnnnnnnnnnnnnnnnnnnnnnnnnnnnnnnnnnnnnnnnnnnnnnnnnnnnnnnnnnnnnnnnnnnnnnnnnnnnnnnnnnnnnnnnnnnnnnnnnnnnnnnnnnnnnnnnnnnnnnnnnnnnnnnnnnnnnnnnnnnnnnnnnnnnnnnnnnnnnnnnnnnnnnnnnnnnnnnnnnnnnnnnnnnnnnnnnnnnnnnnnnnnnnnnnnnnnnnnnnnnnnnnnnnnnnnnnnnnnnnnnnnnnnnnnnnnnnnnnnnnnnnnnnnnnnnnnnnnnnnnnnnnnnnnnnnnnnnnnnnnnnnnnnnnnnnnnnnnnnnnnnnnnnnnnnnnnnnnnnnnnnnnnnnnnnnnnnnnnnnnnnnnnnnnnnnnnnnnnnnnnnnnnnnnnnnnnnnnnnnnnnnnnnnnnnnnnnnnnnnnnnnnnnnnnnnnnnnnnnnnnnnnnnnnnnnnnnnnnnnnnnnnnnnnnnnnnnnnnnnnnnnnnnnnnnnnnnnnnnnnnnnnnnnnnnnnnnnnnnnnnnnnnnnnnnnnnnnnnnnnnnnnnnnnnnnnnnnnnnnnnnnnnnnnnnnnnnnnnnnnnnnnnnnnnnnnnnnnnnnnnnnnnnnnnnnnnnnnnnnnnnnnnnnnnnnnnnnnnnnnnnnnnnnnnnnnnnnnnnnnnnnnnnnnnnnnnnnnnnnnnnnnnnnnnnnnnnnnnnnnnnnnnnnnnnnnnnnnnnnnnnnnnnnnnnnnnnnnnnnnnnnnnnnnnnnnnnnnnnnnnnnnnnnnnnnnnnnnnnnnnnnnnnnnnnnnnnnnnnnnnnnnnnnnnnnnnnnnnnnnnnnnnnnnnnnnnnnnnnnnnnnnnnnnnnnnnnnnnnnnnnnnnnnnnnnnnnnnnnnnnnnnnnnnnnnnnnnnnnnnnnnnnnnnnnnnnnnnnnnnnnnnnnnnnnnnnnnnnnnnnnnnnnnnnnnnnnnnnnnnnnnnnnnnnnnnnnnnnnnnnnnnnnnnnnnnnnnnnnnnnnnnnnnnnnnnnnnnnnnnnnnnnnnnnnnnnnnnnnnnnnnnnnnnnnnnnnnnnnnnnnnnnnnnnnnnnnnnnnnnnnnnnnnnnnnnnnnnnnnnnnnnnnnnnnnnnnnnnnnnnnnnnnnnnnnnnnnnnnnnnnnnnnnnnnnnnnnnnnnnnnnnnnnnnnnnnnnnnnnnnnnnnnnnnnnnnnnnnnnnnnnnnnnnnnnnnnnnnnnnnnnnnnnnnnnnnnnnnnnnnnnnnnnnnnnnnnnnnnnnnnnnnnnnnnnnnnnnnnnnnnnnnnnnnnnnnnnnnnnnnnnnnnnnnnnnnnnnnnnnnnnnnnnnnnnnnnnnnnnnnnnnnnnnnnnnnnnnnnnnnnnnnnnnnnnnnnnnnnnnnnnnnnnnnnnnnnnnnnnnnnnnnnnnnnnnnnnnnnnnnnnnnnnnnnnnnnnnnnnnnnnnnnnnnnnnnnnnnnnnnnnnnnnnnnnnnnnnnnnnnnnnnnnnnnnnnnnnnnnnnnnnnnnnnnnnnnnnnnnnnnnnnnnnnnnnnnnnnnnnnnnnnnnnnnnnnnnnnnnnnnnnnnnnnnnnnnnnnnnnnnnnnnnnnnnnnnnnnnnnnnnnnnnnnnnnnnnnnnnnnnnnnnnnnnnnnnnnnnnnnnnnnnnnnnnnnnnnnnnnnnnnnnnnnnnnnnnnnnnnnnnnnnnnnnnnnnnnnnnnnnnnnnnnnnnnnnnnnnnnnnnnnnnnnnnnnnnnnnnnnnnnnnnnnnnnnnnnnnnnnnnnnnnnnnnnnnnnnnnnnnnnnnnnnnnnnnnnnnnnnnnnnnnnnnnnnnnnnnnnnnnnnnnnnnnnnnnnnnnnnnnnnnnnnnnnnnnnnnnnnnnnnnnnnnnnnnnnnnnnnnnnnnnnnnnnnnnnnnnnnnnnnnnnnnnnnnnnnnnnnnnnnnnnnnnnnnnnnnnnnnnnnnnnnnnnnnnnnnnnnnnnnnnnnnnnnnnnnnnnnnnnnnnnnnnnnnnnnnnnnnnnnnnnnnnnnnnnnnnnnnnnnnnnnnnnnnnnnnnnnnnnnnnnnnnnnnnnnnnnnnnnnnnnnnnnnnnnnnnnnnnnnnnnnnnnnnnnnnnnnnnnnnnnnnnnnnnnnnnnnnnnnnnnnnnnnnnnnnnnnnnnnnnnnnnnnnnnnnnnnnnnnnnnnnnnnnnnnnnnnnnnnnnnnnnnnnnnnnnnnnnnnnnnnnnnnnnnnnnnnnnnnnnnnnnnnnnnnnnnnnnnnnnnnnnnnnnnnnnnnnnnnnnnnnnnnnnnnnnnnnnnnnnnnnnnnnnnnnnnnnnnnnnnnnnnnnnnnnnnnnnnnnnnnnnnnnnnnnnnnnnnnnnnnnnnnnnnnnnnnnnnnnnnnnnnnnnnnnnnnnnnnnnnnnnnnnnnnnnnnnnnnnnnnnnnnnnnnnnnnnnnnnnnnnnnnnnnnnnnnnnnnnnnnnnnnnnnnnnnnnnnnnnnnnnnnnnnnnnnnnnnnnnnnnnnnnnnnnnnnnnnnnnnnnnnnnnnnnnnnnnnnnnnnnnnnnnnnnnnnnnnnnnnnnnnnnnnnnnnnnnnnnnnnnnnnnnnnnnnnnnnnnnnnnnnnnnnnnnnnnnnnnnnnnnnnnnnnnnnnnnnnnnnnnnnnnnnnnnnnnnnnnnnnnnnnnnnnnnnnnnnnnnnnnnnnnnnnnnnnnnnnnnnnnnnnnnnnnnnnnnnnnnnnnnnnnnnnnnnnnnnnnnnnnnnnnnnnnnnnnnnnnnnnnnnnnnnnnnnnnnnnnnnnnnnnnnnnnnnnnnnnnnnnnnnnnnnnnnnnnnnnnnnnnnnnnnnnnnnnnnnnnnnnnnnnnnnnnnnnnnnnnnnnnnnnnnnnnnnnnnnnnnnnnnnnnnnnnnnnnnnnnnnnnnnnnnnnnnnnnnnnnnnnnnnnnnnnnnnnnnnnnnnnnnnnnnnnnnnnnnnnnnnnnnnnnnnnnnnnnnnnnnnnnnnnnnnnnnnnnnnnnnnnnnnnnnnnnnnnnnnnnnnnnnnnnnnnnnnnnnnnnnnnnnnnnnnnnnnnnnnnnnnnnnnnnnnnnnnnnnnnnnnnnnnnnnnnnnnnnnnnnnnnnnnnnnnnnnnnnnnnnnnnnnnnnnnnnnnnnnnnnnnnnnnnnnnnnnnnnnnnnnnnnnnnnnnnnnnnnnnnnnnnnnnnnnnnnnnnnnnnnnnnnnnnnnnnnnnnnnnnnnnnnnnnnnnnnnnnnnnnnnnnnnnnnnnnnnnnnnnnnnnnnnnnnnnnnnnnnnnnnnnnnnnnnnnnnnnnnnnnnnnnnnnnnnnnnnnnnnnnnnnnnnnnnnnnnnnnnnnnnnnnnnnnnnnnnnnnnnnnnnnnnnnnnnnnnnnnnnnnnnnnnnnnnnnnnnnnnnnnnnnnnnnnnnnnnnnnnnnnnnnnnnnnnnnnnnnnnnnnnnnnnnnnnnnnnnnnnnnnnnnnnnnnnnnnnnnnnnnnnnnnnnnnnnnnnnnnnnnnnnnnnnnnnnnnnnnnnnnnnnnnnnnnnnnnnnnnnnnnnnnnnnnnnnnnnnnnnnnnnnnnnnnnnnnnnnnnnnnnnnnnnnnnnnnnnnnnnnnnnnnnnnnnnnnnnnnnnnnnnnnnnnnnnnnnnnnnnnnnnnnnnnnnnnnnnnnnnnnnnnnnnnnnnnnnnnnnnnnnnnnnnnnnnnnnnnnnnnnnnnnnnnnnnnnnnnnnnnnnnnnnnnnnnnnnnnnnnnnnnnnnnnnnnnnnnnnnnnnnnnnnnnnnnnnnnnnnnnnnnnnnnnnnnnnnnnnnnnnnnnnnnnnnnnnnnnnnnnnnnnnnnnnnnnnnnnnnnnnnnnnnnnnnnnnnnnnnnnnnnnnnnnnnnnnnnnnnnnnnnnnnnnnnnnnnnnnnnnnnnnnnnnnnnnnnnnnnnnnnnnnnnnnnnnnnnnnnnnnnnnnnnnnnnnnnnnnnnnnnnnnnnnnnnnnnnnnnnnnnnnnnnnnnnnnnnnnnnnnnnnnnnnnnnnnnnnnnnnnnnnnnnnnnnnnnnnnnnnnnnnnnnnnnnnnnnnnnnnnnnnnnnnnnnnnnnnnnnnnnnnnnnnnnnnnnnnnnnnnnnnnnnnnnnnnnnnnnnnnnnnnnnnnnnnnnnnnnnnnnnnnnnnnnnnnnnnnnnnnnnnnnnnnnnnnnnnnnnnnnnnnnnnnnnnnnnnnnnnnnnnnnnnnnnnnnnnnnnnnnnnnnnnnnnnnnnnnnnnnnnnnnnnnnnnnnnnnnnnnnnnnnnnnnnnnnnnnnnnnnnnnnnnnnnnnnnnnnnnnnnnnnnnnnnnnnnnnnnnnnnnnnnnnnnnnnnnnnnnnnnnnnnnnnnnnnnnnnnnnnnnnnnnnnnnnnnnnnnnnnnnnnnnnnnnnnnnnnnnnnnnnnnnnnnnnnnnnnnnnnnnnnnnnnnnnnnnnnnnnnnnnnnnnnnnnnnnnnnnnnnnnnnnnnnnnnnnnnnnnnnnnnnnnnnnnnnnnnnnnnnnnnnnnnnnnnnnnnnnnnnnnnnnnnnnnnnnnnnnnnnnnnnnnnnnnnnnnnnnnnnnnnnnnnnnnnnnnnnnnnnnnnnnnnnnnnnnnnnnnnnnnnnnnnnnnnnnnnnnnnnnnnnnnnnnnnnnnnnnnnnnnnnnnnnnnnnnnnnnnnnnnnnnnnnnnnnnnnnnnnnnnnnnnnnnnnnnnnnnnnnnnnnnnnnnnnnnnnnnnnnnnnnnnnnnnnnnnnnnnnnnnnnnnnnnnnnnnnnnnnnnnnnnnnnnnnnnnnnnnnnnnnnnnnnnnnnnnnnnnnnnnnnnnnnnnnnnnnnnnnnnnnnnnnnnnnnnnnnnnnnnnnnnnnnnnnnnnnnnnnnnnnnnnnnnnnnnnnnnnnnnnnnnnnnnnnnnnnnnnnnnnnnnnnnnnnnnnnnnnnnnnnnnnnnnnnnnnnnnnnnnnnnnnnnnnnnnnnnnnnnnnnnnnnnnnnnnnnnnnnnnnnnnnnnnnnnnnnnnnnnnnnnnnnnnnnnnnnnnnnnnnnnnnnnnnnnnnnnnnnnnnnnnnnnnnnnnnnnnnnnnnnnnnnnnnnnnnnnnnnnnnnnnnnnnnnnnnnnnnnnnnnnnnnnnnnnnnnnnnnnnnnnnnnnnnnnnnnnnnnnnnnnnnnnnnnnnnnnnnnnnnnnnnnnnnnnnnnnnnnnnnnnnnnnnnnnnnnnnnnnnnnnnnnnnnnnnnnnnnnnnnnnnnnnnnnnnnnnnnnnnnnnnnnnnnnnnnnnnnnnnnnnnnnnnnnnnnnnnnnnnnnnnnnnnnnnnnnnnnnnnnnnnnnnnnnnnnnnnnnnnnnnnnnnnnnnnnnnnnnnnnnnnnnnnnnnnnnnnnnnnnnnnnnnnnnnnnnnnnnnnnnnnnnnnnnnnnnnnnnnnnnnnnnnnnnnnnnnnnnnnnnnnnnnnnnnnnnnnnnnnnnnnnnnnnnnnnnnnnnnnnnnnnnnnnnnnnnnnnnnnnnnnnnnnnnnnnnnnnnnnnnnnnnnnnnnnnnnnnnnnnnnnnnnnnnnnnnnnnnnnnnnnnnnnnnnnnnnnnnnnnnnnnnnnnnnnnnnnnnnnnnnnnnnnnnnnnnnnnnnnnnnnnnnnnnnnnnnnnnnnnnnnnnnnnnnnnnnnnnnnnnnnnnnnnnnnnnnnnnnnnnnnnnnnnnnnnnnnnnnnnnnnnnnnnnnnnnnnnnnnnnnnnnnnnnnnnnnnnnnnnnnnnnnnnnnnnnnnnnnnnnnnnnnnnnnnnnnnnnnnnnnnnnnnnnnnnnnnnnnnnnnnnnnnnnnnnnnnnnnnnnnnnnnnnnnnnnnnnnnnnnnnnnnnnnnnnnnnnnnnnnnnnnnnnnnnnnnnnnnnnnnnnnnnnnnnnnnnnnnnnnnnnnnnnnnnnnnnnnnnnnnnnnnnnnnnnnnnnnnnnnnnnnnnnnnnnnnnnnnnnnnnnnnnnnnnnnnnnnnnnnnnnnnnnnnnnnnnnnnnnnnnnnnnnnnnnnnnnnnnnnnnnnnnnnnnnnnnnnnnnnnnnnnnnnnnnnnnnnnnnnnnnnnnnnnnnnnnnnnnnnnnnnnnnnnnnnnnnnnnnnnnnnnnnnnnnnnnnnnnnnnnnnnnnnnnnnnnnnnnnnnnnnnnnnnnnnnnnnnnnnnnnnnnnnnnnnnnnnnnnnnnnnnnnnnnnnnnnnnnnnnnnnnnnnnnnnnnnnnnnnnnnnnnnnnnnnnnnnnnnnnnnnnnnnnnnnnnnnnnnnnnnnnnnnnnnnnnnnnnnnnnnnnnnnnnnnnnnnnnnnnnnnnnnnnnnnnnnnnnnnnnnnnnnnnnnnnnnnnnnnnnnnnnnnnnnnnnnnnnnnnnnnnnnnnnnnnnnnnnnnnnnnnnnnnnnnnnnnnnnnnnnnnnnnnnnnnnnnnnnnnnnnnnnnnnnnnnnnnnnnnnnnnnnnnnnnnnnnnnnnnnnnnnnnnnnnnnnnnnnnnnnnnnnnnnnnnnnnnnnnnnnnnnnnnnnnnnnnnnnnnnnnnnnnnnnnnnnnnnnnnnnnnnnnnnnnnnnnnnnnnnnnnnnnnnnnnnnnnnnnnnnnnnnnnnnnnnnnnnnnnnnnnnnnnnnnnnnnnnnnnnnnnnnnnnnnnnnnnnnnnnnnnnnnnnnnnnnnnnnnnnnnnnnnnnnnnnnnnnnnnnnnnnnnnnnnnnnnnnnnnnnnnnnnnnnnnnnnnnnnnnnnnnnnnnnnnnnnnnnnnnnnnnnnnnnnnnnnnnnnnnnnnnnnnnnnnnnnnnnnnnnnnnnnnnnnnnnnnnnnnnnnnnnnnnnnnnnnnnnnnnnnnnnnnnnnnnnnnnnnnnnnnnnnnnnnnnnnnnnnnnnnnnnnnnnnnnnnnnnnnnnnnnnnnnnnnnnnnnnnnnnnnnnnnnnnnnnnnnnnnnnnnnnnnnnnnnnnnnnnnnnnnnnnnnnnnnnnnnnnnnnnnnnnnnnnnnnnnnnnnnnnnnnnnnnnnnnnnnnnnnnnnnnnnnnnnnnnnnnnnnnnnnnnnnnnnnnnnnnnnnnnnnnnnnnnnnnnnnnnnnnnnnnnnnnnnnnnnnnnnnnnnnnnnnnnnnnnnnnnnnnnnnnnnnnnnnnnnnnnnnnnnnnnnnnnnnnnnnnnnnnnnnnnnnnnnnnnnnnnnnnnnnnnnnnnnnnnnnnnnnnnnnnnnnnnnnnnnnnnnnnnnnnnnnnnnnnnnnnnnnnnnnnnnnnnnnnnnnnnnnnnnnnnnnnnnnnnnnnnnnnnnnnnnnnnnnnnnnnnnnnnnnnnnnnnnnnnnnnnnnnnnnnnnnnnnnnnnnnnnnnnnnnnnnnnnnnnnnnnnnnnnnnnnnnnnnnnnnnnnnnnnnnnnnnnnnnnnnnnnnnnnnnnnnnnnnnnnnnnnnnnnnnnnnnnnnnnnnnnnnnnnnnnnnnnnnnnnnnnnnnnnnnnnnnnnnnnnnnnnnnnnnnnnnnnnnnnnnnnnnnnnnnnnnnnnnnnnnnnnnnnnnnnnnnnnnnnnnnnnnnnnnnnnnnnnnnnnnnnnnnnnnnnnnnnnnnnnnnnnnnnnnnnnnnnnnnnnnnnnnnnnnnnnnnnnnnnnnnnnnnnnnnnnnnnnnnnnnnnnnnnnnnnnnnnnnnnnnnnnnnnnnnnnnnnnnnnnnnnnnnnnnnnnnnnnnnnnnnnnnnnnnnnnnnnnnnnnnnnnnnnnnnnnnnnnnnnnnnnnnnnnnnnnnnnnnnnnnnnnnnnnnnnnnnnnnnnnnnnnnnnnnnnnnnnnnnnnnnnnnnnnnnnnnnnnnnnnnnnnnnnnnnnnnnnnnnnnnnnnnnnnnnnnnnnnnnnnnnnnnnnnnnnnnnnnnnnnnnnnnnnnnnnnnnnnnnnnnnnnnnnnnnnnnnnnnnnnnnnnnnnnnnnnnnnnnnnnnnnnnnnnnnnnnnnnnnnnnnnnnnnnnnnnnnnnnnnnnnnnnnnnnnnnnnnnnnnnnnnnnnnnnnnnnnnnnnnnnnnnnnnnnnnnnnnnnnnnnnnnnnnnnnnnnnnnnnnnnnnnnnnnnnnnnnnnnnnnnnnnnnnnnnnnnnnnnnnnnnnnnnnnnnnnnnnnnnnnnnnnnnnnnnnnnnnnnnnnnnnnnnnnnnnnnnnnnnnnnnnnnnnnnnnnnnnnnnnnnnnnnnnnnnnnnnnnnnnnnnnnnnnnnnnnnnnnnnnnnnnnnnnnnnnnnnnnnnnnnnnnnnnnnnnnnnnnnnnnnnnnnnnnnnnnnnnnnnnnnnnnnnnnnnnnnnnnnnnnnnnnnnnnnnnnnnnnnnnnnnnnnnnnnnnnnnnnnnnnnnnnnnnnnnnnnnnnnnnnnnnnnnnnnnnnnnnnnnnnnnnnnnnnnnnnnnnnnnnnnnnnnnnnnnnnnnnnnnnnnnnnnnnnnnnnnnnnnnnnnnnnnnnnnnnnnnnnnnnnnnnnnnnnnnnnnnnnnnnnnnnnnnnnnnnnnnnnnnnnnnnnnnnnnnnnnnnnnnnnnnnnnnnnnnnnnnnnnnnnnnnnnnnnnnnnnnnnnnnnnnnnnnnnnnnnnnnnnnnnnnnnnnnnnnnnnnnnnnnnnnnnnnnnnnnnnnnnnnnnnnnnnnnnnnnnnnnnnnnnnnnnnnnnnnnnnnnnnnnnnnnnnnnnnnnnnnnnnnnnnnnnnnnnnnnnnnnnnnnnnnnnnnnnnnnnnnnnnnnnnnnnnnnnnnnnnnnnnnnnnnnnnnnnnnnnnnnnnnnnnnnnnnnnnnnnnnnnnnnnnnnnnnnnnnnnnnnnnnnnnnnnnnnnnnnnnnnnnnnnnnnnnnnnnnnnnnnnnnnnnnnnnnnnnnnnnnnnnnnnnnnnnnnnnnnnnnnnnnnnnnnnnnnnnnnnnnnnnnnnnnnnnnnnnnnnnnnnnnnnnnnnnnnnnnnnnnnnnnnnnnnnnnnnnnnnnnnnnnnnnnnnnnnnnnnnnnnnnnnnnnnnnnnnnnnnnnnnnnnnnnnnnnnnnnnnnnnnnnnnnnnnnnnnnnnnnnnnnnnnnnnnnnnnnnnnnnnnnnnnnnnnnnnnnnnnnnnnnnnnnnnnnnnnnnnnnnnnnnnnnnnnnnnnnnnnnnnnnnnnnnnnnnnnnnnnnnnnnnnnnnnnnnnnnnnnnnnnnnnnnnnnnnnnnnnnnnnnnnnnnnnnnnnnnnnnnnnnnnnnnnnnnnnnnnnnnnnnnnnnnnnnnnnnnnnnnnnnnnnnnnnnnnnnnnnnnnnnnnnnnnnnnnnnnnnnnnnnnnnnnnnnnnnnnnnnnnnnnnnnnnnnnnnnnnnnnnnnnnnnnnnnnnnnnnnnnnnnnnnnnnnnnnnnnnnnnnnnnnnnnnnnnnnnnnnnnnnnnnnnnnnnnnnnnnnnnnnnnnnnnnnnnnnnnnnnnnnnnnnnnnnnnnnnnnnnnnnnnnnnnnnnnnnnnnnnnnnnnnnnnnnnnnnnnnnnnnnnnnnnnnnnnnnnnnnnnnnnnnnnnnnnnnnnnnnnnnnnnnnnnnnnnnnnnnnnnnnnnnnnnnnnnnnnnnnnnnnnnnnnnnnnnnnnnnnnnnnnnnnnnnnnnnnnnnnnnnnnnnnnnnnnnnnnnnnnnnnnnnnnnnnnnnnnnnnnnnnnnnnnnnnnnnnnnnnnnnnnnnnnnnnnnnnnnnnnnnnnnnnnnnnnnnnnnnnnnnnnnnnnnnnnnnnnnnnnnnnnnnnnnnnnnnnnnnnnnnnnnnnnnnnnnnnnnnnnnnnnnnnnnnnnnnnnnnnnnnnnnnnnnnnnnnnnnnnnnnnnnnnnnnnnnnnnnnnnnnnnnnnnnnnnnnnnnnnnnnnnnnnnnnnnnnnnnnnnnnnnnnnnnnnnnnnnnnnnnnnnnnnnnnnnnnnnnnnnnnnnnnnnnnnnnnnnnnnnnnnnnnnnnnnnnnnnnnnnnnnnnnnnnnnnnnnnnnnnnnnnnnnnnnnnnnnnnnnnnnnnnnnnnnnnnnnnnnnnnnnnnnnnnnnnnnnnnnnnnnnnnnnnnnnnnnnnnnnnnnnnnnnnnnnnnnnnnnnnnnnnnnnnnnnnnnnnnnnnnnnnnnnnnnnnnnnnnnnnnnnnnnnnnnnnnnnnnnnnnnnnnnnnnnnnnnnnnnnnnnnnnnnnnnnnnnnnnnnnnnnnnnnnnnnnnnnnnnnnnnnnnnnnnnnnnnnnnnnnnnnnnnnnnnnnnnnnnnnnnnnnnnnnnnnnnnnnnnnnnnnnnnnnnnnnnnnnnnnnnnnnnnnnnnnnnnnnnnnnnnnnnnnnnnnnnnnnnnnnnnnnnnnnnnnnnnnnnnnnnnnnnnnnnnnnnnnnnnnnnnnnnnnnnnnnnnnnnnnnnnnnnnnnnnnnnnnnnnnnnnnnnnnnnnnnnnnnnnnnnnnnnnnnnnnnnnnnnnnnnnnnnnnnnnnnnnnnnnnnnnnnnnnnnnnnnnnnnnnnnnnnnnnnnnnnnnnnnnnnnnnnnnnnnnnnnnnnnnnnnnnnnnnnnnnnnnnnnnnnnnnnnnnnnnnnnnnnnnnnnnnnnnnnnnnnnnnnnnnnnnnnnnnnnnnnnnnnnnnnnnnnnnnnnnnnnnnnnnnnnnnnnnnnnnnnnnnnnnnnnnnnnnnnnnnnnnnnnnnnnnnnnnnnnnnnnnnnnnnnnnnnnnnnnnnnnnnnnnnnnnnnnnnnnnnnnnnnnnnnnnnnnnnnnnnnnnnnnnnnnnnnnnnnnnnnnnnnnnnnnnnnnnnnnnnnnnnnnnnnnnnnnnnnnnnnnnnnnnnnnnnnnnnnnnnnnnnnnnnnnnnnnnnnnnnnnnnnnnnnnnnnnnnnnnnnnnnnnnnnnnnnnnnnnnnnnnnnnnnnnnnnnnnnnnnnnnnnnnnnnnnnnnnnnnnnnnnnnnnnnnnnnnnnnnnnnnnnnnnnnnnnnnnnnnnnnnnnnnnnnnnnnnnnnnnnnnnnnnnnnnnnnnnnnnnnnnnnnnnnnnnnnnnnnnnnnnnnnnnnnnnnnnnnnnnnnnnnnnnnnnnnnnnnnnnnnnnnnnnnnnnnnnnnnnnnnnnnnnnnnnnnnnnnnnnnnnnnnnnnnnnnnnnnnnnnnnnnnnnnnnnnnnnnnnnnnnnnnnnnnnnnnnnnnnnnnnnnnnnnnnnnnnnnnnnnnnnnnnnnnnnnnnnnnnnnnnnnnnnnnnnnnnnnnnnnnnnnnnnnnnnnnnnnnnnnnnnnnnnnnnnnnnnnnnnnnnnnnnnnnnnnnnnnnnnnnnnnnnnnnnnnnnnnnnnnnnnnnnnnnnnnnnnnnnnnnnnnnnnnnnnnnnnnnnnnnnnnnnnnnnnnnnnnnnnnnnnnnnnnnnnnnnnnnnnnnnnnnnnnnnnnnnnnnnnnnnnnnnnnnnnnnnnnnnnnnnnnnnnnnnnnnnnnnnnnnnnnnnnnnnnnnnnnnnnnnnnnnnnnnnnnnnnnnnnnnnnnnnnnnnnnnnnnnnnnnnnnnnnnnnnnnnnnnnnnnnnnnnnnnnnnnnnnnnnnnnnnnnnnnnnnnnnnnnnnnnnnnnnnnnnnnnnnnnnnnnnnnnnnnnnnnnnnnnnnnnnnnnnnnnnnnnnnnnnnnnnnnnnnnnnnnnnnnnnnnnnnnnnnnnnnnnnnnnnnnnnnnnnnnnnnnnnnnnnnnnnnnnnnnnnnnnnnnnnnnnnnnnnnnnnnnnnnnnnnnnnnnnnnnnnnnnnnnnnnnnnnnnnnnnnnnnnnnnnnnnnnnnnnnnnnnnnnnnnnnnnnnnnnnnnnnnnnnnnnnnnnnnnnnnnnnnnnnnnnnnnnnnnnnnnnnnnnnnnnnnnnnnnnnnnnnnnnnnnnnnnnnnnnnnnnnnnnnnnnnnnnnnnnnnnnnnnnnnnnnnnnnnnnnnnnnnnnnnnnnnnnnnnnnnnnnnnnnnnnnnnnnnnnnnnnnnnnnnnnnnnnnnnnnnnnnnnnnnnnnnnnnnnnnnnnnnnnnnnnnnnnnnnnnnnnnnnnnnnnnnnnnnnnnnnnnnnnnnnnnnnnnnnnnnnnnnnnnnnnnnnnnnnnnnnnnnnnnnnnnnnnnnnnnnnnnnnnnnnnnnnnnnnnnnnnnnnnnnnnnnnnnnnnnnnnnnnnnnnnnnnnnnnnnnnnnnnnnnnnnnnnnnnnnnnnnnnnnnnnnnnnnnnnnnnnnnnnnnnnnnnnnnnnnnnnnnnnnnnnnnnnnnnnnnnnnnnnnnnnnnnnnnnnnnnnnnnnnnnnnnnnnnnnnnnnnnnnnnnnnnnnnnnnnnnnnnnnnnnnnnnnnnnnnnnnnnnnnnnnnnnnnnnnnnnnnnnnnnnnnnnnnnnnnnnnnnnnnnnnnnnnnnnnnnnnnnnnnnnnnnnnnnnnnnnnnnnnnnnnnnnnnnnnnnnnnnnnnnnnnnnnnnnnnnnnnnnnnnnnnnnnnnnnnnnnnnnnnnnnnnnnnnnnnnnnnnnnnnnnnnnnnnnnnnnnnnnnnnnnnnnnnnnnnnnnnnnnnnnnnnnnnnnnnnnnnnnnnnnnnnnnnnnnnnnnnnnnnnnnnnnnnnnnnnnnnnnnnnnnnnnnnnnnnnnnnnnnnnnnnnnnnnnnnnnnnnnnnnnnnnnnnnnnnnnnnnnnnnnnnnnnnnnnnnnnnnnnnnnnnnnnnnnnnnnnnnnnnnnnnnnnnnnnnnnnnnnnnnnnnnnnnnnnnnnnnnnnnnnnnnnnnnnnnnnnnnnnnnnnnnnnnnnnnnnnnnnnnnnnnnnnnnnnnnnnnnnnnnnnnnnnnnnnnnnnnnnnnnnnnnnnnnnnnnnnnnnnnnnnnnnnnnnnnnnnnnnnnnnnnnnnnnnnnnnnnnnnnnnnnnnnnnnnnnnnnnnnnnnnnnnnnnnnnnnnnnnnnnnnnnnnnnnnnnnnnnnnnnnnnnnnnnnnnnnnnnnnnnnnnnnnnnnnnnnnnnnnnnnnnnnnnnnnnnnnnnnnnnnnnnnnnnnnnnnnnnnnnnnnnnnnnnnnnnnnnnnnnnnnnnnnnnnnnnnnnnnnnnnnnnnnnnnnnnnnnnnnnnnnnnnnnnnnnnnnnnnnnnnnnnnnnnnnnnnnnnnnnnnnnnnnnnnnnnnnnnnnnnnnnnnnnnnnnnnnnnnnnnnnnnnnnnnnnnnnnnnnnnnnnnnnnnnnnnnnnnnnnnnnnnnnnnnnnnnnnnnnnnnnnnnnnnnnnnnnnnnnnnnnnnnnnnnnnnnnnnnnnnnnnnnnnnnnnnnnnnnnnnnnnnnnnnnnnnnnnnnnnnnnnnnnnnnnnnnnnnnnnnnnnnnnnnnnnnnnnnnnnnnnnnnnnnnnnnnnnnnnnnnnnnnnnnnnnnnnnnnnnnnnnnnnnnnnnnnnnnnnnnnnnnnnnnnnnnnnnnnnnnnnnnnnnnnnnnnnnnnnnnnnnnnnnnnnnnnnnnnnnnnnnnnnnnnnnnnnnnnnnnnnnnnnnnnnnnnnnnnnnnnnnnnnnnnnnnnnnnnnnnnnnnnnnnnnnnnnnnnnnnnnnnnnnnnnnnnnnnnnnnnnnnnnnnnnnnnnnnnnnnnnnnnnnnnnnnnnnnnnnnnnnnnnnnnnnnnnnnnnnnnnnnnnnnnnnnnnnnnnnnnnnnnnnnnnnnnnnnnnnnnnnnnnnnnnnnnnnnnnnnnnnnnnnnnnnnnnnnnnnnnnnnnnnnnnnnnnnnnnnnnnnnnnnnnnnnnnnnnnnnnnnnnnnnnnnnnnnnnnnnnnnnnnnnnnnnnnnnnnnnnnnnnnnnnnnnnnnnnnnnnnnnnnnnnnnnnnnnnnnnnnnnnnnnnnnnnnnnnnnnnnnnnnnnnnnnnnnnnnnnnnnnnnnnnnnnnnnnnnnnnnnnnnnnnnnnnnnnnnnnnnnnnnnnnnnnnnnnnnnnnnnnnnnnnnnnnnnnnnnnnnnnnnnnnnnnnnnnnnnnnnnnnnnnnnnnnnnnnnnnnnnnnnnnnnnnnnnnnnnnnnnnnnnnnnnnnnnnnnnnnnnnnnnnnnnnnnnnnnnnnnnnnnnnnnnnnnnnnnnnnnnnnnnnnnnnnnnnnnnnnnnnnnnnnnnnnnnnnnnnnnnnnnnnnnnnnnnnnnnnnnnnnnnnnnnnnnnnnnnnnnnnnnnnnnnnnnnnnnnnnnnnnnnnnnnnnnnnnnnnnnnnnnnnnnnnnnnnnnnnnnnnnnnnnnnnnnnnnnnnnnnnnnnnnnnnnnnnnnnnnnnnnnnnnnnnnnnnnnnnnnnnnnnnnnnnnnnnnnnnnnnnnnnnnnnnnnnnnnnnnnnnnnnnnnnnnnnnnnnnnnnnnnnnnnnnnnnnnnnnnnnnnnnnnnnnnnnnnnnnnnnnnnnnnnnnnnnnnnnnnnnnnnnnnnnnnnnnnnnnnnnnnnnnnnnnnnnnnnnnnnnnnnnnnnnnnnnnnnnnnnnnnnnnnnnnnnnnnnnnnnnnnnnnnnnnnnnnnnnnnnnnnnnnnnnnnnnnnnnnnnnnnnnnnnnnnnnnnnnnnnnnnnnnnnnnnnnnnnnnnnnnnnnnnnnnnnnnnnnnnnnnnnnnnnnnnnnnnnnnnnnnnnnnnnnnnnnnnnnnnnnnnnnnnnnnnnnnnnnnnnnnnnnnnnnnnnnnnnnnnnnnnnnnnnnnnnnnnnnnnnnnnnnnnnnnnnnnnnnnnnnnnnnnnnnnnnnnnnnnnnnnnnnnnnnnnnnnnnnnnnnnnnnnnnnnnnnnnnnnnnnnnnnnnnnnnnnnnnnnnnnnnnnnnnnnnnnnnnnnnnnnnnnnnnnnnnnnnnnnnnnnnnnnnnnnnnnnnnnnnnnnnnnnnnnnnnnnnnnnnnnnnnnnnnnnnnnnnnnnnnnnnnnnnnnnnnnnnnnnnnnnnnnnnnnnnnnnnnnnnnnnnnnnnnnnnnnnnnnnnnnnnnnnnnnnnnnnnnnnnnnnnnnnnnnnnnnnnnnnnnnnnnnnnnnnnnnnnnnnnnnnnnnnnnnnnnnnnnnnnnnnnnnnnnnnnnnnnnnnnnnnnnnnnnnnnnnnnnnnnnnnnnnnnnnnnnnnnnnnnnnnnnnnnnnnnnnnnnnnnnnnnnnnnnnnnnnnnnnnnnnnnnnnnnnnnnnnnnnnnnnnnnnnnnnnnnnnnnnnnnnnnnnnnnnnnnnnnnnnnnnnnnnnnnnnnnnnnnnnnnnnnnnnnnnnnnnnnnnnnnnnnnnnnnnnnnnnnnnnnnnnnnnnnnnnnnnnnnnnnnnnnnnnnnnnnnnnnnnnnnnnnnnnnnnnnnnnnnnnnnnnnnnnnnnnnnnnnnnnnnnnnnnnnnnnnnnnnnnnnnnnnnnnnnnnnnnnnnnnnnnnnnnnnnnnnnnnnnnnnnnnnnnnnnnnnnnnnnnnnnnnnnnnnnnnnnnnnnnnnnnnnnnnnnnnnnnnnnnnnnnnnnnnnnnnnnnnnnnnnnnnnnnnnnnnnnnnnnnnnnnnnnnnnnnnnnnnnnnnnnnnnnnnnnnnnnnnnnnnnnnnnnnnnnnnnnnnnnnnnnnnnnnnnnnnnnnnnnnnnnnnnnnnnnnnnnnnnnnnnnnnnnnnnnnnnnnnnnnnnnnnnnnnnnnnnnnnnnnnnnnnnnnnnnnnnnnnnnnnnnnnnnnnnnnnnnnnnnnnnnnnnnnnnnnnnnnnnnnnnnnnnnnnnnnnnnnnnnnnnnnnnnnnnnnnnnnnnnnnnnnnnnnnnnnnnnnnnnnnnnnnnnnnnnnnnnnnnnnnnnnnnnnnnnnnnnnnnnnnnnnnnnnnnnnnnnnnnnnnnnnnnnnnnnnnnnnnnnnnnnnnnnnnnnnnnnnnnnnnnnnnnnnnnnnnnnnnnnnnnnnnnnnnnnnnnnnnnnnnnnnnnnnnnnnnnnnnnnnnnnnnnnnnnnnnnnnnnnnnnnnnnnnnnnnnnnnnnnnnnnnnnnnnnnnnnnnnnnnnnnnnnnnnnnnnnnnnnnnnnnnnnnnnnnnnnnnnnnnnnnnnnnnnnnnnnnnnnnnnnnnnnnnnnnnnnnnnnnnnnnnnnnnnnnnnnnnnnnnnnnnnnnnnnnnnnnnnnnnnnnnnnnnnnnnnnnnnnnnnnnnnnnnnnnnnnnnnnnnnnnnnnnnnnnnnnnnnnnnnnnnnnnnnnnnnnnnnnnnnnnnnnnnnnnnnnnnnnnnnnnnnnnnnnnnnnnnnnnnnnnnnnnnnnnnnnnnnnnnnnnnnnnnnnnnnnnnnnnnnnnnnnnnnnnnnnnnnnnnnnnnnnnnnnnnnnnnnnnnnnnnnnnnnnnnnnnnnnnnnnnnnnnnnnnnnnnnnnnnnnnnnnnnnnnnnnnnnnnnnnnnnnnnnnnnnnnnnnnnnnnnnnnnnnnnnnnnnnnnnnnnnnnnnnnnnnnnnnnnnnnnnnnnnnnnnnnnnnnnnnnnnnnnnnnnnnnnnnnnnnnnnnnnnnnnnnnnnnnnnnnnnnnnnnnnnnnnnnnnnnnnnnnnnnnnnnnnnnnnnnnnnnnnnnnnnnnnnnnnnnnnnnnnnnnnnnnnnnnnnnnnnnnnnnnnnnnnnnnnnnnnnnnnnnnnnnnnnnnnnnnnnnnnnnnnnnnnnnnnnnnnnnnnnnnnnnnnnnnnnnnnnnnnnnnnnnnnnnnnnnnnnnnnnnnnnnnnnnnnnnnnnnnnnnnnnnnnnnnnnnnnnnnnnnnnnnnnnnnnnnnnnnnnnnnnnnnnnnnnnnnnnnnnnnnnnnnnnnnnnnnnnnnnnnnnnnnnnnnnnnnnnnnnnnnnnnnnnnnnnnnnnnnnnnnnnnnnnnnnnnnnnnnnnnnnnnnnnnnnnnnnnnnnnnnnnnnnnnnnnnnnnnnnnnnnnnnnnnnnnnnnnnnnnnnnnnnnnnnnnnnnnnnnnnnnnnnnnnnnnnnnnnnnnnnnnnnnnnnnnnnnnnnnnnnnnnnnnnnnnnnnnnnnnnnnnnnnnnnnnnnnnnnnnnnnnnnnnnnnnnnnnnnnnnnnnnnnnnnnnnnnnnnnnnnnnnnnnnnnnnnnnnnnnnnnnnnnnnnnnnnnnnnnnnnnnnnnnnnnnnnnnnnnnnnnnnnnnnnnnnnnnnnnnnnnnnnnnnnnnnnnnnnnnnnnnnnnnnnnnnnnnnnnnnnnnnnnnnnnnnnnnnnnnnnnnnnnnnnnnnnnnnnnnnnnnnnnnnnnnnnnnnnnnnnnnnnnnnnnnnnnnnnnnnnnnnnnnnnnnnnnnnnnnnnnnnnnnnnnnnnnnnnnnnnnnnnnnnnnnnnnnnnnnnnnnnnnnnnnnnnnnnnnnnnnnnnnnnnnnnnnnnnnnnnnnnnnnnnnnnnnnnnnnnnnnnnnnnnnnnnnnnnnnnnnnnnnnnnnnnnnnnnnnnnnnnnnnnnnnnnnnnnnnnnnnnnnnnnnnnnnnnnnnnnnnnnnnnnnnnnnnnnnnnnnnnnnnnnnnnnnnnnnnnnnnnnnnnnnnnnnnnnnnnnnnnnnnnnnnnnnnnnnnnnnnnnnnnnnnnnnnnnnnnnnnnnnnnnnnnnnnnnnnnnnnnnnnnnnnnnnnnnnnnnnnnnnnnnnnnnnnnnnnnnnnnnnnnnnnnnnnnnnnnnnnnnnnnnnnnnnnnnnnnnnnnnnnnnnnnnnnnnnnnnnnnnnnnnnnnnnnnnnnnnnnnnnnnnnnnnnnnnnnnnnnnnnnnnnnnnnnnnnnnnnnnnnnnnnnnnnnnnnnnnnnnnnnnnnnnnnnnnnnnnnnnnnnnnnnnnnnnnnnnnnnnnnnnnnnnnnnnnnnnnnnnnnnnnnnnnnnnnnnnnnnnnnnnnnnnnnnnnnnnnnnnnnnnnnnnnnnnnnnnnnnnnnnnnnnnnnnnnnnnnnnnnnnnnnnnnnnnnnnnnnnnnnnnnnnnnnnnnnnnnnnnnnnnnnnnnnnnnnnnnnnnnnnnnnnnnnnnnnnnnnnnnnnnnnnnnnnnnnnnnnnnnnnnnnnnnnnnnnnnnnnnnnnnnnnnnnnnnnnnnnnnnnnnnnnnnnnnnnnnnnnnnnnnnnnnnnnnnnnnnnnnnnnnnnnnnnnnnnnnnnnnnnnnnnnnnnnnnnnnnnnnnnnnnnnnnnnnnnnnnnnnnnnnnnnnnnnnnnnnnnnnnnnnnnnnnnnnnnnnnnnnnnnnnnnnnnnnnnnnnnnnnnnnnnnnnnnnnnnnnnnnnnnnnnnnnnnnnnnnnnnnnnnnnnnnnnnnnnnnnnnnnnnnnnnnnnnnnnnnnnnnnnnnnnnnnnnnnnnnnnnnnnnnnnnnnnnnnnnnnnnnnnnnnnnnnnnnnnnnnnnnnnnnnnnnnnnnnnnnnnnnnnnnnnnnnnnnnnnnnnnnnnnnnnnnnnnnnnnnnnnnnnnnnnnnnnnnnnnnnnnnnnnnnnnnnnnnnnnnnnnnnnnnnnnnnnnnnnnnnnnnnnnnnnnnnnnnnnnnnnnnnnnnnnnnnnnnnnnnnnnnnnnnnnnnnnnnnnnnnnnnnnnnnnnnnnnnnnnnnnnnnnnnnnnnnnnnnnnnnnnnnnnnnnnnnnnnnnnnnnnnnnnnnnnnnnnnnnnnnnnnnnnnnnnnnnnnnnnnnnnnnnnnnnnnnnnnnnnnnnnnnnnnnnnnnnnnnnnnnnnnnnnnnnnnnnnnnnnnnnnnnnnnnnnnnnnnnnnnnnnnnnnnnnnnnnnnnnnnnnnnnnnnnnnnnnnnnnnnnnnnnnnnnnnnnnnnnnnnnnnnnnnnnnnnnnnnnnnnnnnnnnnnnnnnnnnnnnnnnnnnnnnnnnnnnnnnnnnnnnnnnnnnnnnnnnnnnnnnnnnnnnnnnnnnnnnnnnnnnnnnnnnnnnnnnnnnnnnnnnnnnnnnnnnnnnnnnnnnnnnnnnnnnnnnnnnnnnnnnnnnnnnnnnnnnnnnnnnnnnnnnnnnnnnnnnnnnnnnnnnnnnnnnnnnnnnnnnnnnnnnnnnnnnnnnnnnnnnnnnnnnnnnnnnnnnnnnnnnnnnnnnnnnnnnnnnnnnnnnnnnnnnnnnnnnnnnnnnnnnnnnnnnnnnnnnnnnnnnnnnnnnnnnnnnnnnnnnnnnnnnnnnnnnnnnnnnnnnnnnnnnnnnnnnnnnnnnnnnnnnnnnnnnnnnnnnnnnnnnnnnnnnnnnnnnnnnnnnnnnnnnnnnnnnnnnnnnnnnnnnnnnnnnnnnnnnnnnnnnnnnnnnnnnnnnnnnnnnnnnnnnnnnnnnnnnnnnnnnnnnnnnnnnnnnnnnnnnnnnnnnnnnnnnnnnnnnnnnnnnnnnnnnnnnnnnnnnnnnnnnnnnnnnnnnnnnnnnnnnnnnnnnnnnnnnnnnnnnnnnnnnnnnnnnnnnnnnnnnnnnnnnnnnnnnnnnnnnnnnnnnnnnnnnnnnnnnnnnnnnnnnnnnnnnnnnnnnnnnnnnnnnnnnnnnnnnnnnnnnnnnnnnnnnnnnnnnnnnnnnnnnnnnnnnnnnnnnnnnnnnnnnnnnnnnnnnnnnnnnnnnnnnnnnnnnnnnnnnnnnnnnnnnnnnnnnnnnnnnnnnnnnnnnnnnnnnnnnnnnnnnnnnnnnnnnnnnnnnnnnnnnnnnnnnnnnnnnnnnnnnnnnnnnnnnnnnnnnnnnnnnnnnnnnnnnnnnnnnnnnnnnnnnnnnnnnnnnnnnnnnnnnnnnnnnnnnnnnnnnnnnnnnnnnnnnnnnnnnnnnnnnnnnnnnnnnnnnnnnnnnnnnnnnnnnnnnnnnnnnnnnnnnnnnnnnnnnnnnnnnnnnnnnnnnnnnnnnnnnnnnnnnnnnnnnnnnnnnnnnnnnnnnnnnnnnnnnnnnnnnnnnnnnnnnnnnnnnnnnnnnnnnnnnnnnnnnnnnnnnnnnnnnnnnnnnnnnnnnnnnnnnnnnnnnnnnnnnnnnnnnnnnnnnnnnnnnnnnnnnnnnnnnnnnnnnnnnnnnnnnnnnnnnnnnnnnnnnnnnnnnnnnnnnnnnnnnnnnnnnnnnnnnnnnnnnnnnnnnnnnnnnnnnnnnnnnnnnnnnnnnnnnnnnnnnnnnnnnnnnnnnnnnnnnnnnnnnnnnnnnnnnnnnnnnnnnnnnnnnnnnnnnnnnnnnnnnnnnnnnnnnnnnnnnnnnnnnnnnnnnnnnnnnnnnnnnnnnnnnnnnnnnnnnnnnnnnnnnnnnnnnnnnnnnnnnnnnnnnnnnnnnnnnnnnnnnnnnnnnnnnnnnnnnnnnnnnnnnnnnnnnnnnnnnnnnnnnnnnnnnnnnnnnnnnnnnnnnnnnnnnnnnnnnnnnnnnnnnnnnnnnnnnnnnnnnnnnnnnnnnnnnnnnnnnnnnnnnnnnnnnnnnnnnnnnnnnnnnnnnnnnnnnnnnnnnnnnnnnnnnnnnnnnnnnnnnnnnnnnnnnnnnnnnnnnnnnnnnnnnnnnnnnnnnnnnnnnnnnnnnnnnnnnnnnnnnnnnnnnnnnnnnnnnnnnnnnnnnnnnnnnnnnnnnnnnnnnnnnnnnnnnnnnnnnnnnnnnnnnnnnnnnnnnnnnnnnnnnnnnnnnnnnnnnnnnnnnnnnnnnnnnnnnnnnnnnnnnnnnnnnnnnnnnnnnnnnnnnnnnnnnnnnnnnnnnnnnnnnnnnnnnnnnnnnnnnnnnnnnnnnnnnnnnnnnnnnnnnnnnnnnnnnnnnnnnnnnnnnnnnnnnnnnnnnnnnnnnnnnnnnnnnnnnnnnnnnnnnnnnnnnnnnnnnnnnnnnnnnnnnnnnnnnnnnnnnnnnnnnnnnnnnnnnnnnnnnnnnnnnnnnnnnnnnnnnnnnnnnnnnnnnnnnnnnnnnnnnnnnnnnnnnnnnnnnnnnnnnnnnnnnnnnnnnnnnnnnnnnnnnnnnnnnnnnnnnnnnnnnnnnnnnnnnnnnnnnnnnnnnnnnnnnnnnnnnnnnnnnnnnnnnnnnnnnnnnnnnnnnnnnnnnnnnnnnnnnnnnnnnnnnnnnnnnnnnnnnnnnnnnnnnnnnnnnnnnnnnnnnnnnnnnnnnnnnnnnnnnnnnnnnnnnnnnnnnnnnnnnnnnnnnnnnnnnnnnnnnnnnnnnnnnnnnnnnnnnnnnnnnnnnnnnnnnnnnnnnnnnnnnnnnnnnnnnnnnnnnnnnnnnnnnnnnnnnnnnnnnnnnnnnnnnnnnnnnnnnnnnnnnnnnnnnnnnnnnnnnnnnnnnnnnnnnnnnnnnnnnnnnnnnnnnnnnnnnnnnnnnnnnnnnnnnnnnnnnnnnnnnnnnnnnnnnnnnnnnnnnnnnnnnnnnnnnnnnnnnnnnnnnnnnnnnnnnnnnnnnnnnnnnnnnnnnnnnnnnnnnnnnnnnnnnnnnnnnnnnnnnnnnnnnnnnnnnnnnnnnnnnnnnnnnnnnnnnnnnnnnnnnnnnnnnnnnnnnnnnnnnnnnnnnnnnnnnnnnnnnnnnnnnnnnnnnnnnnnnnnnnnnnnnnnnnnnnnnnnnnnnnnnnnnnnnnnnnnnnnnnnnnnnnnnnnnnnnnnnnnnnnnnnnnnnnnnnnnnnnnnnnnnnnnnnnnnnnnnnnnnnnnnnnnnnnnnnnnnnnnnnnnnnnnnnnnnnnnnnnnnnnnnnnnnnnnnnnnnnnnnnnnnnnnnnnnnnnnnnnnnnnnnnnnnnnnnnnnnnnnnnnnnnnnnnnnnnnnnnnnnnnnnnnnnnnnnnnnnnnnnnnnnnnnnnnnnnnnnnnnnnnnnnnnnnnnnnnnnnnnnnnnnnnnnnnnnnnnnnnnnnnnnnnnnnnnnnnnnnnnnnnnnnnnnnnnnnnnnnnnnnnnnnnnnnnnnnnnnnnnnnnnnnnnnnnnnnnnnnnnnnnnnnnnnnnnnnnnnnnnnnnnnnnnnnnnnnnnnnnnnnnnnnnnnnnnnnnnnnnnnnnnnnnnnnnnnnnnnnnnnnnnnnnnnnnnnnnnnnnnnnnnnnnnnnnnnnnnnnnnnnnnnnnnnnnnnnnnnnnnnnnnnnnnnnnnnnnnnnnnnnnnnnnnnnnnnnnnnnnnnnnnnnnnnnnnnnnnnnnnnnnnnnnnnnnnnnnnnnnnnnnnnnnnnnnnnnnnnnnnnnnnnnnnnnnnnnnnnnnnnnnnnnnnnnnnnnnnnnnnnnnnnnnnnnnnnnnnnnnnnnnnnnnnnnnnnnnnnnnnnnnnnnnnnnnnnnnnnnnnnnnnnnnnnnnnnnnnnnnnnnnnnnnnnnnnnnnnnnnnnnnnnnnnnnnnnnnnnnnnnnnnnnnnnnnnnnnnnnnnnnnnnnnnnnnnnnnnnnnnnnnnnnnnnnnnnnnnnnnnnnnnnnnnnnnnnnnnnnnnnnnnnnnnnnnnnnnnnnnnnnnnnnnnnnnnnnnnnnnnnnnnnnnnnnnnnnnnnnnnnnnnnnnnnnnnnnnnnnnnnnnnnnnnnnnnnnnnnnnnnnnnnnnnnnnnnnnnnnnnnnnnnnnnnnnnnnnnnnnnnnnnnnnnnnnnnnnnnnnnnnnnnnnnnnnnnnnnnnnnnnnnnnnnnnnnnnnnnnnnnnnnnnnnnnnnnnnnnnnnnnnnnnnnnnnnnnnnnnnnnnnnnnnnnnnnnnnnnnnnnnnnnnnnnnnnnnnnnnnnnnnnnnnnnnnnnnnnnnnnnnnnnnnnnnnnnnnnnnnnnnnnnnnnnnnnnnnnnnnnnnnnnnnnnnnnnnnnnnnnnnnnnnnnnnnnnnnnnnnnnnnnnnnnnnnnnnnnnnnnnnnnnnnnnnnnnnnnnnnnnnnnnnnnnnnnnnnnnnnnnnnnnnnnnnnnnnnnnnnnnnnnnnnnnnnnnnnnnnnnnnnnnnnnnnnnnnnnnnnnnnnnnnnnnnnnnnnnnnnnnnnnnnnnnnnnnnnnnnnnnnnnnnnnnnnnnnnnnnnnnnnnnnnnnnnnnnnnnnnnnnnnnnnnnnnnnnnnnnnnnnnnnnnnnnnnnnnnnnnnnnnnnnnnnnnnnnnnnnnnnnnnnnnnnnnnnnnnnnnnnnnnnnnnnnnnnnnnnnnnnnnnnnnnnnnnnnnnnnnnnnnnnnnnnnnnnnnnnnnnnnnnnnnnnnnnnnnnnnnnnnnnnnnnnnnnnnnnnnnnnnnnnnnnnnnnnnnnnnnnnnnnnnnnnnnnnnnnnnnnnnnnnnnnnnnnnnnnnnnnnnnnnnnnnnnnnnnnnnnnnnnnnnnnnnnnnnnnnnnnnnnnnnnnnnnnnnnnnnnnnnnnnnnnnnnnnnnnnnnnnnnnnnnnnnnnnnnnnnnnnnnnnnnnnnnnnnnnnnnnnnnnnnnnnnnnnnnnnnnnnnnnnnnnnnnnnnnnnnnnnnnnnnnnnnnnnnnnnnnnnnnnnnnnnnnnnnnnnnnnnnnnnnnnnnnnnnnnnnnnnnnnnnnnnnnnnnnnnnnnnnnnnnnnnnnnnnnnnnnnnnnnnnnnnnnnnnnnnnnnnnnnnnnnnnnnnnnnnnnnnnnnnnnnnnnnnnnnnnnnnnnnnnnnnnnnnnnnnnnnnnnnnnnnnnnnnnnnnnnnnnnnnnnnnnnnnnnnnnnnnnnnnnnnnnnnnnnnnnnnnnnnnnnnnnnnnnnnnnnnnnnnnnnnnnnnnnnnnnnnnnnnnnnnnnnnnnnnnnnnnnnnnnnnnnnnnnnnnnnnnnnnnnnnnnnnnnnnnnnnnnnnnnnnnnnnnnnnnnnnnnnnnnnnnnnnnnnnnnnnnnnnnnnnnnnnnnnnnnnnnnnnnnnnnnnnnnnnnnnnnnnnnnnnnnnnnnnnnnnnnnnnnnnnnnnnnnnnnnnnnnnnnnnnnnnnnnnnnnnnnnnnnnnnnnnnnnnnnnnnnnnnnnnnnnnnnnnnnnnnnnnnnnnnnnnnnnnnnnnnnnnnnnnnnnnnnnnnnnnnnnnnnnnnnnnnnnnnnnnnnnnnnnnnnnnnnnnnnnnnnnnnnnnnnnnnnnnnnnnnnnnnnnnnnnnnnnnnnnnnnnnnnnnnnnnnnnnnnnnnnnnnnnnnnnnnnnnnnnnnnnnnnnnnnnnnnnnnnnnnnnnnnnnnnnnnnnnnnnnnnnnnnnnnnnnnnnnnnnnnnnnnnnnnnnnnnnnnnnnnnnnnnnnnnnnnnnnnnnnnnnnnnnnnnnnnnnnnnnnnnnnnnnnnnnnnnnnnnnnnnnnnnnnnnnnnnnnnnnnnnnnnnnnnnnnnnnnnnnnnnnnnnnnnnnnnnnnnnnnnnnnnnnnnnnnnnnnnnnnnnnnnnnnnnnnnnnnnnnnnnnnnnnnnnnnnnnnnnnnnnnnnnnnnnnnnnnnnnnnnnnnnnnnnnnnnnnnnnnnnnnnnnnnnnnnnnnnnnnnnnnnnnnnnnnnnnnnnnnnnnnnnnnnnnnnnnnnnnnnnnnnnnnnnnnnnnnnnnnnnnnnnnnnnnnnnnnnnnnnnnnnnnnnnnnnnnnnnnnnnnnnnnnnnnnnnnnnnnnnnnnnnnnnnnnnnnnnnnnnnnnnnnnnnnnnnnnnnnnnnnnnnnnnnnnnnnnnnnnnnnnnnnnnnnnnnnnnnnnnnnnnnnnnnnnnnnnnnnnnnnnnnnnnnnnnnnnnnnnnnnnnnnnnnnnnnnnnnnnnnnnnnnnnnnnnnnnnnnnnnnnnnnnnnnnnnnnnnnnnnnnnnnnnnnnnnnnnnnnnnnnnnnnnnnnnnnnnnnnnnnnnnnnnnnnnnnnnnnnnnnnnnnnnnnnnnnnnnnnnnnnnnnnnnnnnnnnnnnnnnnnnnnnnnnnnnnnnnnnnnnnnnnnnnnnnnnnnnnnnnnnnnnnnnnnnnnnnnnnnnnnnnnnnnnnnnnnnnnnnnnnnnnnnnnnnnnnnnnnnnnnnnnnnnnnnnnnnnnnnnnnnnnnnnnnnnnnnnnnnnnnnnnnnnnnnnnnnnnnnnnnnnnnnnnnnnnnnnnnnnnnnnnnnnnnnnnnnnnnnnnnnnnnnnnnnnnnnnnnnnnnnnnnnnnnnnnnnnnnnnnnnnnnnnnnnnnnnnnnnnnnnnnnnnnnnnnnnnnnnnnnnnnnnnnnnnnnnnnnnnnnnnnnnnnnnnnnnnnnnnnnnnnnnnnnnnnnnnnnnnnnnnnnnnnnnnnnnnnnnnnnnnnnnnnnnnnnnnnnnnnnnnnnnnnnnnnnnnnnnnnnnnnnnnnnnnnnnnnnnnnnnnnnnnnnnnnnnnnnnnnnnnnnnnnnnnnnnnnnnnnnnnnnnnnnnnnnnnnnnnnnnnnnnnnnnnnnnnnnnnnnnnnnnnnnnnnnnnnnnnnnnnnnnnnnnnnnnnnnnnnnnnnnnnnnnnnnnnnnnnnnnnnnnnnnnnnnnnnnnnnnnnnnnnnnnnnnnnnnnnnnnnnnnnnnnnnnnnnnnnnnnnnnnnnnnnnnnnnnnnnnnnnnnnnnnnnnnnnnnnnnnnnnnnnnnnnnnnnnnnnnnnnnnnnnnnnnnnnnnnnnnnnnnnnnnnnnnnnnnnnnnnnnnnnnnnnnnnnnnnnnnnnnnnnnnnnnnnnnnnnnnnnnnnnnnnnnnnnnnnnnnnnnnnnnnnnnnnnnnnnnnnnnnnnnnnnnnnnnnnnnnnnnnnnnnnnnnnnnnnnnnnnnnnnnnnnnnnnnnnnnnnnnnnnnnnnnnnnnnnnnnnnnnnnnnnnnnnnnnnnnnnnnnnnnnnnnnnnnnnnnnnnnnnnnnnnnnnnnnnnnnnnnnnnnnnnnnnnnnnnnnnnnnnnnnnnnnnnnnnnnnnnnnnnnnnnnnnnnnnnnnnnnnnnnnnnnnnnnnnnnnnnnnnnnnnnnnnnnnnnnnnnnnnnnnnnnnnnnnnnnnnnnnnnnnnnnnnnnnnnnnnnnnnnnnnnnnnnnnnnnnnnnnnnnnnnnnnnnnnnnnnnnnnnnnnnnnnnnnnnnnnnnnnnnnnnnnnnnnnnnnnnnnnnnnnnnnnnnnnnnnnnnnnnnnnnnnnnnnnnnnnnnnnnnnnnnnnnnnnnnnnnnnnnnnnnnnnnnnnnnnnnnnnnnnnnnnnnnnnnnnnnnnnnnnnnnnnnnnnnnnnnnnnnnnnnnnnnnnnnnnnnnnnnnnnnnnnnnnnnnnnnnnnnnnnnnnnnnnnnnnnnnnnnnnnnnnnnnnnnnnnnnnnnnnnnnnnnnnnnnnnnnnnnnnnnnnnnnnnnnnnnnnnnnnnnnnnnnnnnnnnnnnnnnnnnnnnnnnnnnnnnnnnnnnnnnnnnnnnnnnnnnnnnnnnnnnnnnnnnnnnnnnnnnnnnnnnnnnnnnnnnnnnnnnnnnnnnnnnnnnnnnnnnnnnnnnnnnnnnnnnnnnnnnnnnnnnnnnnnnnnnnnnnnnnnnnnnnnnnnnnnnnnnnnnnnnnnnnnnnnnnnnnnnnnnnnnnnnnnnnnnnnnnnnnnnnnnnnnnnnnnnnnnnnnnnnnnnnnnnnnnnnnnnnnnnnnnnnnnnnnnnnnnnnnnnnnnnnnnnnnnnnnnnnnnnnnnnnnnnnnnnnnnnnnnnnnnnnnnnnnnnnnnnnnnnnnnnnnnnnnnnnnnnnnnnnnnnnnnnnnnnnnnnnnnnnnnnnnnnnnnnnnnnnnnnnnnnnnnnnnnnnnnnnnnnnnnnnnnnnnnnnnnnnnnnnnnnnnnnnnnnnnnnnnnnnnnnnnnnnnnnnnnnnnnnnnnnnnnnnnnnnnnnnnnnnnnnnnnnnnnnnnnnnnnnnnnnnnnnnnnnnnnnnnnnnnnnnnnnnnnnnnnnnnnnnnnnnnnnnnnnnnnnnnnnnnnnnnnnnnnnnnnnnnnnnnnnnnnnnnnnnnnnnnnnnnnnnnnnnnnnnnnnnnnnnnnnnnnnnnnnnnnnnnnnnnnnnnnnnnnnnnnnnnnnnnnnnnnnnnnnnnnnnnnnnnnnnnnnnnnnnnnnnnnnnnnnnnnnnnnnnnnnnnnnnnnnnnnnnnnnnnnnnnnnnnnnnnnnnnnnnnnnnnnnnnnnnnnnnnnnnnnnnnnnnnnnnnnnnnnnnnnnnnnnnnnnnnnnnnnnnnnnnnnnnnnnnnnnnnnnnnnnnnnnnnnnnnnnnnnnnnnnnnnnnnnnnnnnnnnnnnnnnnnnnnnnnnnnnnnnnnnnnnnnnnnnnnnnnnnnnnnnnnnnnnnnnnnnnnnnnnnnnnnnnnnnnnnnnnnnnnnnnnnnnnnnnnnnnnnnnnnnnnnnnnnnnnnnnnnnnnnnnnnnnnnnnnnnnnnnnnnnnnnnnnnnnnnnnnnnnnnnnnnnnnnnnnnnnnnnnnnnnnnnnnnnnnnnnnnnnnnnnnnnnnnnnnnnnnnnnnnnnnnnnnnnnnnnnnnnnnnnnnnnnnnnnnnnnnnnnnnnnnnnnnnnnnnnnnnnnnnnnnnnnnnnnnnnnnnnnnnnnnnnnnnnnnnnnnnnnnnnnnnnnnnnnnnnnnnnnnnnnnnnnnnnnnnnnnnnnnnnnnnnnnnnnnnnnnnnnnnnnnnnnnnnnnnnnnnnnnnnnnnnnnnnnnnnnnnnnnnnnnnnnnnnnnnnnnnnnnnnnnnnnnnnnnnnnnnnnnnnnnnnnnnnnnnnnnnnnnnnnnnnnnnnnnnnnnnnnnnnnnnnnnnnnnnnnnnnnnnnnnnnnnnnnnnnnnnnnnnnnnnnnnnnnnnnnnnnnnnnnnnnnnnnnnnnnnnnnnnnnnnnnnnnnnnnnnnnnnnnnnnnnnnnnnnnnnnnnnnnnnnnnnnnnnnnnnnnnnnnnnnnnnnnnnnnnnnnnnnnnnnnnnnnnnnnnnnnnnnnnnnnnnnnnnnnnnnnnnnnnnnnnnnnnnnnnnnnnnnnnnnnnnnnnnnnnnnnnnnnnnnnnnnnnnnnnnnnnnnnnnnnnnnnnnnnnnnnnnnnnnnnnnnnnnnnnnnnnnnnnnnnnnnnnnnnnnnnnnnnnnnnnnnnnnnnnnnnnnnnnnnnnnnnnnnnnnnnnnnnnnnnnnnnnnnnnnnnnnnnnnnnnnnnnnnnnnnnnnnnnnnnnnnnnnnnnnnnnnnnnnnnnnnnnnnnnnnnnnnnnnnnnnnnnnnnnnnnnnnnnnnnnnnnnnnnnnnnnnnnnnnnnnnnnnnnnnnnnnnnnnnnnnnnnnnnnnnnnnnnnnnnnnnnnnnnnnnnnnnnnnnnnnnnnnnnnnnnnnnnnnnnnnnnnnnnnnnnnnnnnnnnnnnnnnnnnnnnnnnnnnnnnnnnnnnnnnnnnnnnnnnnnnnnnnnnnnnnnnnnnnnnnnnnnnnnnnnnnnnnnnnnnnnnnnnnnnnnnnnnnnnnnnnnnnnnnnnnnnnnnnnnnnnnnnnnnnnnnnnnnnnnnnnnnnnnnnnnnnnnnnnnnnnnnnnnnnnnnnnnnnnnnnnnnnnnnnnnnnnnnnnnnnnnnnnnnnnnnnnnnnnnnnnnnnnnnnnnnnnnnnnnnnnnnnnnnnnnnnnnnnnnnnnnnnnnnnnnnnnnnnnnnnnnnnnnnnnnnnnnnnnnnnnnnnnnnnnnnnnnnnnnnnnnnnnnnnnnnnnnnnnnnnnnnnnnnnnnnnnnnnnnnnnnnnnnnnnnnnnnnnnnnnnnnnnnnnnnnnnnnnnnnnnnnnnnnnnnnnnnnnnnnnnnnnnnnnnnnnnnnnnnnnnnnnnnnnnnnnnnnnnnnnnnnnnnnnnnnnnnnnnnnnnnnnnnnnnnnnnnnnnnnnnnnnnnnnnnnnnnnnnnnnnnnnnnnnnnnnnnnnnnnnnnnnnnnnnnnnnnnnnnnnnnnnnnnnnnnnnnnnnnnnnnnnnnnnnnnnnnnnnnnnnnnnnnnnnnnnnnnnnnnnnnnnnnnnnnnnnnnnnnnnnnnnnnnnnnnnnnnnnnnnnnnnnnnnnnnnnnnnnnnnnnnnnnnnnnnnnnnnnnnnnnnnnnnnnnnnnnnnnnnnnnnnnnnnnnnnnnnnnnnnnnnnnnnnnnnnnnnnnnnnnnnnnnnnnnnnnnnnnnnnnnnnnnnnnnnnnnnnnnnnnnnnnnnnnnnnnnnnnnnnnnnnnnnnnnnnnnnnnnnnnnnnnnnnnnnnnnnnnnnnnnnnnnnnnnnnnnnnnnnnnnnnnnnnnnnnnnnnnnnnnnnnnnnnnnnnnnnnnnnnnnnnnnnnnnnnnnnnnnnnnnnnnnnnnnnnnnnnnnnnnnnnnnnnnnnnnnnnnnnnnnnnnnnnnnnnnnnnnnnnnnnnnnnnnnnnnnnnnnnnnnnnnnnnnnnnnnnnnnnnnnnnnnnnnnnnnnnnnnnnnnnnnnnnnnnnnnnnnnnnnnnnnnnnnnnnnnnnnnnnnnnnnnnnnnnnnnnnnnnnnnnnnnnnnnnnnnnnnnnnnnnnnnnnnnnnnnnnnnnnnnnnnnnnnnnnnnnnnnnnnnnnnnnnnnnnnnnnnnnnnnnnnnnnnnnnnnnnnnnnnnnnnnnnnnnnnnnnnnnnnnnnnnnnnnnnnnnnnnnnnnnnnnnnnnnnnnnnnnnnnnnnnnnnnnnnnnnnnnnnnnnnnnnnnnnnnnnnnnnnnnnnnnnnnnnnnnnnnnnnnnnnnnnnnnnnnnnnnnnnnnnnnnnnnnnnnnnnnnnnnnnnnnnnnnnnnnnnnnnnnnnnnnnnnnnnnnnnnnnnnnnnnnnnnnnnnnnnnnnnnnnnnnnnnnnnnnnnnnnnnnnnnnnnnnnnnnnnnnnnnnnnnnnnnnnnnnnnnnnnnnnnnnnnnnnnnnnnnnnnnnnnnnnnnnnnnnnnnnnnnnnnnnnnnnnnnnnnnnnnnnnnnnnnnnnnnnnnnnnnnnnnnnnnnnnnnnnnnnnnnnnnnnnnnnnnnnnnnnnnnnnnnnnnnnnnnnnnnnnnnnnnnnnnnnnnnnnnnnnnnnnnnnnnnnnnnnnnnnnnnnnnnnnnnnnnnnnnnnnnnnnnnnnnnnnnnnnnnnnnnnnnnnnnnnnnnnnnnnnnnnnnnnnnnnnnnnnnnnnnnnnnnnnnnnnnnnnnnnnnnnnnnnnnnnnnnnnnnnnnnnnnnnnnnnnnnnnnnnnnnnnnnnnnnnnnnnnnnnnnnnnnnnnnnnnnnnnnnnnnnnnnnnnnnnnnnnnnnnnnnnnnnnnnnnnnnnnnnnnnnnnnnnnnnnnnnnnnnnnnnnnnnnnnnnnnnnnnnnnnnnnnnnnnnnnnnnnnnnnnnnnnnnnnnnnnnnnnnnnnnnnnnnnnnnnnnnnnnnnnnnnnnnnnnnnnnnnnnnnnnnnnnnnnnnnnnnnnnnnnnnnnnnnnnnnnnnnnnnnnnnnnnnnnnnnnnnnnnnnnnnnnnnnnnnnnnnnnnnnnnnnnnnnnnnnnnnnnnnnnnnnnnnnnnnnnnnnnnnnnnnnnnnnnnnnnnnnnnnnnnnnnnnnnnnnnnnnnnnnnnnnnnnnnnnnnnnnnnnnnnnnnnnnnnnnnnnnnnnnnnnnnnnnnnnnnnnnnnnnnnnnnnnnnnnnnnnnnnnnnnnnnnnnnnnnnnnnnnnnnnnnnnnnnnnnnnnnnnnnnnnnnnnnnnnnnnnnnnnnnnnnnnnnnnnnnnnnnnnnnnnnnnnnnnnnnnnnnnnnnnnnnnnnnnnnnnnnnnnnnnnnnnnnnnnnnnnnnnnnnnnnnnnnnnnnnnnnnnnnnnnnnnnnnnnnnnnnnnnnnnnnnnnnnnnnnnnnnnnnnnnnnnnnnnnnnnnnnnnnnnnnnnnnnnnnnnnnnnnnnnnnnnnnnnnnnnnnnnnnnnnnnnnnnnnnnnnnnnnnnnnnnnnnnnnnnnnnnnnnnnnnnnnnnnnnnnnnnnnnnnnnnnnnnnnnnnnnnnnnnnnnnnnnnnnnnnnnnnnnnnnnnnnnnnnnnnnnnnnnnnnnnnnnnnnnnnnnnnnnnnnnnnnnnnnnnnnnnnnnnnnnnnnnnnnnnnnnnnnnnnnnnnnnnnnnnnnnnnnnnnnnnnnnnnnnnnnnnnnnnnnnnnnnnnnnnnnnnnnnnnnnnnnnnnnnnnnnnnnnnnnnnnnnnnnnnnnnnnnnnnnnnnnnnnnnnnnnnnnnnnnnnnnnnnnnnnnnnnnnnnnnnnnnnnnnnnnnnnnnnnnnnnnnnnnnnnnnnnnnnnnnnnnnnnnnnnnnnnnnnnnnnnnnnnnnnnnnnnnnnnnnnnnnnnnnnnnnnnnnnnnnnnnnnnnnnnnnnnnnnnnnnnnnnnnnnnnnnnnnnnnnnnnnnnnnnnnnnnnnnnnnnnnnnnnnnnnnnnnnnnnnnnnnnnnnnnnnnnnnnnnnnnnnnnnnnnnnnnnnnnnnnnnnnnnnnnnnnnnnnnnnnnnnnnnnnnnnnnnnnnnnnnnnnnnnnnnnnnnnnnnnnnnnnnnnnnnnnnnnnnnnnnnnnnnnnnnnnnnnnnnnnnnnnnnnnnnnnnnnnnnnnnnnnnnnnnnnnnnnnnnnnnnnnnnnnnnnnnnnnnnnnnnnnnnnnnnnnnnnnnnnnnnnnnnnnnnnnnnnnnnnnnnnnnnnnnnnnnnnnnnnnnnnnnnnnnnnnnnnnnnnnnnnnnnnnnnnnnnnnnnnnnnnnnnnnnnnnnnnnnnnnnnnnnnnnnnnnnnnnnnnnnnnnnnnnnnnnnnnnnnnnnnnnnnnnnnnnnnnnnnnnnnnnnnnnnnnnnnnnnnnnnnnnnnnnnnnnnnnnnnnnnnnnnnnnnnnnnnnnnnnnnnnnnnnnnnnnnnnnnnnnnnnnnnnnnnnnnnnnnnnnnnnnnnnnnnnnnnnnnnnnnnnnnnnnnnnnnnnnnnnnnnnnnnnnnnnnnnnnnnnnnnnnnnnnnnnnnnnnnnnnnnnnnnnnnnnnnnnnnnnnnnnnnnnnnnnnnnnnnnnnnnnnnnnnnnnnnnnnnnnnnnnnnnnnnnnnnnnnnnnnnnnnnnnnnnnnnnnnnnnnnnnnnnnnnnnnnnnnnnnnnnnnnnnnnnnnnnnnnnnnnnnnnnnnnnnnnnnnnnnnnnnnnnnnnnnnnnnnnnnnnnnnnnnnnnnnnnnnnnnnnnnnnnnnnnnnnnnnnnnnnnnnnnnnnnnnnnnnnnnnnnnnnnnnnnnnnnnnnnnnnnnnnnnnnnnnnnnnnnnnnnnnnnnnnnnnnnnnnnnnnnnnnnnnnnnnnnnnnnnnnnnnnnnnnnnnnnnnnnnnnnnnnnnnnnnnnnnnnnnnnnnnnnnnnnnnnnnnnnnnnnnnnnnnnnnnnnnnnnnnnnnnnnnnnnnnnnnnnnnnnnnnnnnnnnnnnnnnnnnnnnnnnnnnnnnnnnnnnnnnnnnnnnnnnnnnnnnnnnnnnnnnnnnnnnnnnnnnnnnnnnnnnnnnnnnnnnnnnnnnnnnnnnnnnnnnnnnnnnnnnnnnnnnnnnnnnnnnnnnnnnnnnnnnnnnnnnnnnnnnnnnnnnnnnnnnnnnnnnnnnnnnnnnnnnnnnnnnnnnnnnnnnnnnnnnnnnnnnnnnnnnnnnnnnnnnnnnnnnnnnnnnnnnnnnnnnnnnnnnnnnnnnnnnnnnnnnnnnnnnnnnnnnnnnnnnnnnnnnnnnnnnnnnnnnnnnnnnnnnnnnnnnnnnnnnnnnnnnnnnnnnnnnnnnnnnnnnnnnnnnnnnnnnnnnnnnnnnnnnnnnnnnnnnnnnnnnnnnnnnnnnnnnnnnnnnnnnnnnnnnnnnnnnnnnnnnnnnnnnnnnnnnnnnnnnnnnnnnnnnnnnnnnnnnnnnnnnnnnnnnnnnnnnnnnnnnnnnnnnnnnnnnnnnnnnnnnnnnnnnnnnnnnnnnnnnnnnnnnnnnnnnnnnnnnnnnnnnnnnnnnnnnnnnnnnnnnnnnnnnnnnnnnnnnnnnnnnnnnnnnnnnnnnnnnnnnnnnnnnnnnnnnnnnnnnnnnnnnnnnnnnnnnnnnnnnnnnnnnnnnnnnnnnnnnnnnnnnnnnnnnnnnnnnnnnnnnnnnnnnnnnnnnnnnnnnnnnnnnnnnnnnnnnnnnnnnnnnnnnnnnnnnnnnnnnnnnnnnnnnnnnnnnnnnnnnnnnnnnnnnnnnnnnnnnnnnnnnnnnnnnnnnnnnnnnnnnnnnnnnnnnnnnnnnnnnnnnnnnnnnnnnnnnnnnnnnnnnnnnnnnnnnnnnnnnnnnnnnnnnnnnnnnnnnnnnnnnnnnnnnnnnnnnnnnnnnnnnnnnnnnnnnnnnnnnnnnnnnnnnnnnnnnnnnnnnnnnnnnnnnnnnnnnnnnnnnnnnnnnnnnnnnnnnnnnnnnnnnnnnnnnnnnnnnnnnnnnnnnnnnnnnnnnnnnnnnnnnnnnnnnnnnnnnnnnnnnnnnnnnnnnnnnnnnnnnnnnnnnnnnnnnnnnnnnnnnnnnnnnnnnnnnnnnnnnnnnnnnnnnnnnnnnnnnnnnnnnnnnnnnnnnnnnnnnnnnnnnnnnnnnnnnnnnnnnnnnnnnnnnnnnnnnnnnnnnnnnnnnnnnnnnnnnnnnnnnnnnnnnnnnnnnnnnnnnnnnnnnnnnnnnnnnnnnnnnnnnnnnnnnnnnnnnnnnnnnnnnnnnnnnnnnnnnnnnnnnnnnnnnnnnnnnnnnnnnnnnnnnnnnnnnnnnnnnnnnnnnnnnnnnnnnnnnnnnnnnnnnnnnnnnnnnnnnnnnnnnnnnnnnnnnnnnnnnnnnnnnnnnnnnnnnnnnnnnnnnnnnnnnnnnnnnnnnnnnnnnnnnnnnnnnnnnnnnnnnnnnnnnnnnnnnnnnnnnnnnnnnnnnnnnnnnnnnnnnnnnnnnnnnnnnnnnnnnnnnnnnnnnnnnnnnnnnnnnnnnnnnnnnnnnnnnnnnnnnnnnnnnnnnnnnnnnnnnnnnnnnnnnnnnnnnnnnnnnnnnnnnnnnnnnnnnnnnnnnnnnnnnnnnnnnnnnnnnnnnnnnnnnnnnnnnnnnnnnnnnnnnnnnnnnnnnnnnnnnnnnnnnnnnnnnnnnnnnnnnnnnnnnnnnnnnnnnnnnnnnnnnnnnnnnnnnnnnnnnnnnnnnnnnnnnnnnnnnnnnnnnnnnnnnnnnnnnnnnnnnnnnnnnnnnnnnnnnnnnnnnnnnnnnnnnnnnnnnnnnnnnnnnnnnnnnnnnnnnnnnnnnnnnnnnnnnnnnnnnnnnnnnnnnnnnnnnnnnnnnnnnnnnnnnnnnnnnnnnnnnnnnnnnnnnnnnnnnnnnnnnnnnnnnnnnnnnnnnnnnnnnnnnnnnnnnnnnnnnnnnnnnnnnnnnnnnnnnnnnnnnnnnnnnnnnnnnnnnnnnnnnnnnnnnnnnnnnnnnnnnnnnnnnnnnnnnnnnnnnnnnnnnnnnnnnnnnnnnnnnnnnnnnnnnnnnnnnnnnnnnnnnnnnnnnnnnnnnnnnnnnnnnnnnnnnnnnnnnnnnnnnnnnnnnnnnnnnnnnnnnnnnnnnnnnnnnnnnnnnnnnnnnnnnnnnnnnnnnnnnnnnnnnnnnnnnnnnnnnnnnnnnnnnnnnnnnnnnnnnnnnnnnnnnnnnnnnnnnnnnnnnnnnnnnnnnnnnnnnnnnnnnnnnnnnnnnnnnnnnnnnnnnnnnnnnnnnnnnnnnnnnnnnnnnnnnnnnnnnnnnnnnnnnnnnnnnnnnnnnnnnnnnnnnnnnnnnnnnnnnnnnnnnnnnnnnnnnnnnnnnnnnnnnnnnnnnnnnnnnnnnnnnnnnnnnnnnnnnnnnnnnnnnnnnnnnnnnnnnnnnnnnnnnnnnnnnnnnnnnnnnnnnnnnnnnnnnnnnnnnnnnnnnnnnnnnnnnnnnnnnnnnnnnnnnnnnnnnnnnnnnnnnnnnnnnnnnnnnnnnnnnnnnnnnnnnnnnnnnnnnnnnnnnnnnnnnnnnnnnnnnnnnnnnnnnnnnnnnnnnnnnnnnnnnnnnnnnnnnnnnnnnnnnnnnnnnnnnnnnnnnnnnnnnnnnnnnnnnnnnnnnnnnnnnnnnnnnnnnnnnnnnnnnnnnnnnnnnnnnnnnnnnnnnnnnnnnnnnnnnnnnnnnnnnnnnnnnnnnnnnnnnnnnnnnnnnnnnnnnnnnnnnnnnnnnnnnnnnnnnnnnnnnnnnnnnnnnnnnnnnnnnnnnnnnnnnnnnnnnnnnnnnnnnnnnnnnnnnnnnnnnnnnnnnnnnnnnnnnnnnnnnnnnnnnnnnnnnnnnnnnnnnnnnnnnnnnnnnnnnnnnnnnnnnnnnnnnnnnnnnnnnnnnnnnnnnnnnnnnnnnnnnnnnnnnnnnnnnnnnnnnnnnnnnnnnnnnnnnnnnnnnnnnnnnnnnnnnnnnnnnnnnnnnnnnnnnnnnnnnnnnnnnnnnnnnnnnnnnnnnnnnnnnnnnnnnnnnnnnnnnnnnnnnnnnnnnnnnnnnnnnnnnnnnnnnnnnnnnnnnnnnnnnnnnnnnnnnnnnnnnnnnnnnnnnnnnnnnnnnnnnnnnnnnnnnnnnnnnnnnnnnnnnnnnnnnnnnnnnnnnnnnnnnnnnnnnnnnnnnnnnnnnnnnnnnnnnnnnnnnnnnnnnnnnnnnnnnnnnnnnnnnnnnnnnnnnnnnnnnnnnnnnnnnnnnnnnnnnnnnnnnnnnnnnnnnnnnnnnnnnnnnnnnnnnnnnnnnnnnnnnnnnnnnnnnnnnnnnnnnnnnnnnnnnnnnnnnnnnnnnnnnnnnnnnnnnnnnnnnnnnnnnnnnnnnnnnnnnnnnnnnnnnnnnnnnnnnnnnnnnnnnnnnnnnnnnnnnnnnnnnnnnnnnnnnnnnnnnnnnnnnnnnnnnnnnnnnnnnnnnnnnnnnnnnnnnnnnnnnnnnnnnnnnnnnnnnnnnnnnnnnnnnnnnnnnnnnnnnnnnnnnnnnnnnnnnnnnnnnnnnnnnnnnnnnnnnnnnnnnnnnnnnnnnnnnnnnnnnnnnnnnnnnnnnnnnnnnnnnnnnnnnnnnnnnnnnnnnnnnnnnnnnnnnnnnnnnnnnnnnnnnnnnnnnnnnnnnnnnnnnnnnnnnnnnnnnnnnnnnnnnnnnnnnnnnnnnnnnnnnnnnnnnnnnnnnnnnnnnnnnnnnnnnnnnnnnnnnnnnnnnnnnnnnnnnnnnnnnnnnnnnnnnnnnnnnnnnnnnnnnnnnnnnnnnnnnnnnnnnnnnnnnnnnnnnnnnnnnnnnnnnnnnnnnnnnnnnnnnnnnnnnnnnnnnnnnnnnnnnnnnnnnnnnnnnnnnnnnnnnnnnnnnnnnnnnnnnnnnnnnnnnnnnnnnnnnnnnnnnnnnnnnnnnnnnnnnnnnnnnnnnnnnnnnnnnnnnnnnnnnnnnnnnnnnnnnnnnnnnnnnnnnnnnnnnnnnnnnnnnnnnnnnnnnnnnnnnnnnnnnnnnnnnnnnnnnnnnnnnnnnnnnnnnnnnnnnnnnnnnnnnnnnnnnnnnnnnnnnnnnnnnnnnnnnnnnnnnnnnnnnnnnnnnnnnnnnnnnnnnnnnnnnnnnnnnnnnnnnnnnnnnnnnnnnnnnnnnnnnnnnnnnnnnnnnnnnnnnnnnnnnnnnnnnnnnnnnnnnnnnnnnnnnnnnnnnnnnnnnnnnnnnnnnnnnnnnnnnnnnnnnnnnnnnnnnnnnnnnnnnnnnnnnnnnnnnnnnnnnnnnnnnnnnnnnnnnnnnnnnnnnnnnnnnnnnnnnnnnnnnnnnnnnnnnnnnnnnnnnnnnnnnnnnnnnnnnnnnnnnnnnnnnnnnnnnnnnnnnnnnnnnnnnnnnnnnnnnnnnnnnnnnnnnnnnnnnnnnnnnnnnnnnnnnnnnnnnnnnnnnnnnnnnnnnnnnnnnnnnnnnnnnnnnnnnnnnnnnnnnnnnnnnnnnnnnnnnnnnnnnnnnnnnnnnnnnnnnnnnnnnnnnnnnnnnnnnnnnnnnnnnnnnnnnnnnnnnnnnnnnnnnnnnnnnnnnnnnnnnnnnnnnnnnnnnnnnnnnnnnnnnnnnnnnnnnnnnnnnnnnnnnnnnnnnnnnnnnnnnnnnnnnnnnnnnnnnnnnnnnnnnnnnnnnnnnnnnnnnnnnnnnnnnnnnnnnnnnnnnnnnnnnnnnnnnnnnnnnnnnnnnnnnnnnnnnnnnnnnnnnnnnnnnnnnnnnnnnnnnnnnnnnnnnnnnnnnnnnnnnnnnnnnnnnnnnnnnnnnnnnnnnnnnnnnnnnnnnnnnnnnnnnnnnnnnnnnnnnnnnnnnnnnnnnnnnnnnnnnnnnnnnnnnnnnnnnnnnnnnnnnnnnnnnnnnnnnnnnnnnnnnnnnnnnnnnnnnnnnnnnnnnnnnnnnnnnnnnnnnnnnnnnnnnnnnnnnnnnnnnnnnnnnnnnnnnnnnnnnnnnnnnnnnnnnnnnnnnnnnnnnnnnnnnnnnnnnnnnnnnnnnnnnnnnnnnnnnnnnnnnnnnnnnnnnnnnnnnnnnnnnnnnnnnnnnnnnnnnnnnnnnnnnnnnnnnnnnnnnnnnnnnnnnnnnnnnnnnnnnnnnnnnnnnnnnnnnnnnnnnnnnnnnnnnnnnnnnnnnnnnnnnnnnnnnnnnnnnnnnnnnnnnnnnnnnnnnnnnnnnnnnnnnnnnnnnnnnnnnnnnnnnnnnnnnnnnnnnnnnnnnnnnnnnnnnnnnnnnnnnnnnnnnnnnnnnnnnnnnnnnnnnnnnnnnnnnnnnnnnnnnnnnnnnnnnnnnnnnnnnnnnnnnnnnnnnnnnnnnnnnnnnnnnnnnnnnnnnnnnnnnnnnnnnnnnnnnnnnnnnnnnnnnnnnnnnnnnnnnnnnnnnnnnnnnnnnnnnnnnnnnnnnnnnnnnnnnnnnnnnnnnnnnnnnnnnnnnnnnnnnnnnnnnnnnnnnnnnnnnnnnnnnnnnnnnnnnnnnnnnnnnnnnnnnnnnnnnnnnnnnnnnnnnnnnnnnnnnnnnnnnnnnnnnnnnnnnnnnnnnnnnnnnnnnnnnnnnnnnnnnnnnnnnnnnnnnnnnnnnnnnnnnnnnnnnnnnnnnnnnnnnnnnnnnnnnnnnnnnnnnnnnnnnnnnnnnnnnnnnnnnnnnnnnnnnnnnnnnnnnnnnnnnnnnnnnnnnnnnnnnnnnnnnnnnnnnnnnnnnnnnnnnnnnnnnnnnnnnnnnnnnnnnnnnnnnnnnnnnnnnnnnnnnnnnnnnnnnnnnnnnnnnnnnnnnnnnnnnnnnnnnnnnnnnnnnnnnnnnnnnnnnnnnnnnnnnnnnnnnnnnnnnnnnnnnnnnnnnnnnnnnnnnnnnnnnnnnnnnnnnnnnnnnnnnnnnnnnnnnnnnnnnnnnnnnnnnnnnnnnnnnnnnnnnnnnnnnnnnnnnnnnnnnnnnnnnnnnnnnnnnnnnnnnnnnnnnnnnnnnnnnnnnnnnnnnnnnnnnnnnnnnnnnnnnnnnnnnnnnnnnnnnnnnnnnnnnnnnnnnnnnnnnnnnnnnnnnnnnnnnnnnnnnnnnnnnnnnnnnnnnnnnnnnnnnnnnnnnnnnnnnnnnnnnnnnnnnnnnnnnnnnnnnnnnnnnnnnnnnnnnnnnnnnnnnnnnnnnnnnnnnnnnnnnnnnnnnnnnnnnnnnnnnnnnnnnnnnnnnnnnnnnnnnnnnnnnnnnnnnnnnnnnnnnnnnnnnnnnnnnnnnnnnnnnnnnnnnnnnnnnnnnnnnnnnnnnnnnnnnnnnnnnnnnnnnnnnnnnnnnnnnnnnnnnnnnnnnnnnnnnnnnnnnnnnnnnnnnnnnnnnnnnnnnnnnnnnnnnnnnnnnnnnnnnnnnnnnnnnnnnnnnnnnnnnnnnnnnnnnnnnnnnnnnnnnnnnnnnnnnnnnnnnnnnnnnnnnnnnnnnnnnnnnnnnnnnnnnnnnnnnnnnnnnnnnnnnnnnnnnnnnnnnnnnnnnnnnnnnnnnnnnnnnnnnnnnnnnnnnnnnnnnnnnnnnnnnnnnnnnnnnnnnnnnnnnnnnnnnnnnnnnnnnnnnnnnnnnnnnnnnnnnnnnnnnnnnnnnnnnnnnnnnnnnnnnnnnnnnnnnnnnnnnnnnnnnnnnnnnnnnnnnnnnnnnnnnnnnnnnnnnnnnnnnnnnnnnnnnnnnnnnnnnnnnnnnnnnnnnnnnnnnnnnnnnnnnnnnnnnnnnnnnnnnnnnnnnnnnnnnnnnnnnnnnnnnnnnnnnnnnnnnnnnnnnnnnnnnnnnnnnnnnnnnnnnnnnnnnnnnnnnnnnnnnnnnnnnnnnnnnnnnnnnnnnnnnnnnnnnnnnnnnnnnnnnnnnnnnnnnnnnnnnnnnnnnnnnnnnnnnnnnnnnnnnnnnnnnnnnnnnnnnnnnnnnnnnnnnnnnnnnnnnnnnnnnnnnnnnnnnnnnnnnnnnnnnnnnnnnnnnnnnnnnnnnnnnnnnnnnnnnnnnnnnnnnnnnnnnnnnnnnnnnnnnnnnnnnnnnnnnnnnnnnnnnnnnnnnnnnnnnnnnnnnnnnnnnnnnnnnnnnnnnnnnnnnnnnnnnnnnnnnnnnnnnnnnnnnnnnnnnnnnnnnnnnnnnnnnnnnnnnnnnnnnnnnnnnnnnnnnnnnnnnnnnnnnnnnnnnnnnnnnnnnnnnnnnnnnnnnnnnnnnnnnnnnnnnnnnnnnnnnnnnnnnnnnnnnnnnnnnnnnnnnnnnnnnnnnnnnnnnnnnnnnnnnnnnnnnnnnnnnnnnnnnnnnnnnnnnnnnnnnnnnnnnnnnnnnnnnnnnnnnnnnnnnnnnnnnnnnnnnnnnnnnnnnnnnnnnnnnnnnnnnnnnnnnnnnnnnnnnnnnnnnnnnnnnnnnnnnnnnnnnnnnnnnnnnnnnnnnnnnnnnnnnnnnnnnnnnnnnnnnnnnnnnnnnnnnnnnnnnnnnnnnnnnnnnnnnnnnnnnnnnnnnnnnnnnnnnnnnnnnnnnnnnnnnnnnnnnnnnnnnnnnnnnnnnnnnnnnnnnnnnnnnnnnnnnnnnnnnnnnnnnnnnnnnnnnnnnnnnnnnnnnnnnnnnnnnnnnnnnnnnnnnnnnnnnnnnnnnnnnnnnnnnnnnnnnnnnnnnnnnnnnnnnnnnnnnnnnnnnnnnnnnnnnnnnnnnnnnnnnnnnnnnnnnnnnnnnnnnnnnnnnnnnnnnnnnnnnnnnnnnnnnnnnnnnnnnnnnnnnnnnnnnnnnnnnnnnnnnnnnnnnnnnnnnnnnnnnnnnnnnnnnnnnnnnnnnnnnnnnnnnnnnnnnnnnnnnnnnnnnnnnnnnnnnnnnnnnnnnnnnnnnnnnnnnnnnnnnnnnnnnnnnnnnnnnnnnnnnnnnnnnnnnnnnnnnnnnnnnnnnnnnnnnnnnnnnnnnnnnnnnnnnnnnnnnnnnnnnnnnnnnnnnnnnnnnnnnnnnnnnnnnnnnnnnnnnnnnnnnnnnnnnnnnnnnnnnnnnnnnnnnnnnnnnnnnnnnnnnnnnnnnnnnnnnnnnnnnnnnnnnnnnnnnnnnnnnnnnnnnnnnnnnnnnnnnnnnnnnnnnnnnnnnnnnnnnnnnnnnnnnnnnnnnnnnnnnnnnnnnnnnnnnnnnnnnnnnnnnnnnnnnnnnnnnnnnnnnnnnnnnnnnnnnnnnnnnnnnnnnnnnnnnnnnnnnnnnnnnnnnnnnnnnnnnnnnnnnnnnnnnnnnnnnnnnnnnnnnnnnnnnnnnnnnnnnnnnnnnnnnnnnnnnnnnnnnnnnnnnnnnnnnnnnnnnnnnnnnnnnnnnnnnnnnnnnnnnnnnnnnnnnnnnnnnnnnnnnnnnnnnnnnnnnnnnnnnnnnnnnnnnnnnnnnnnnnnnnnnnnnnnnnnnnnnnnnnnnnnnnnnnnnnnnnnnnnnnnnnnnnnnnnnnnnnnnnnnnnnnnnnnnnnnnnnnnnnnnnnnnnnnnnnnnnnnnnnnnnnnnnnnnnnnnnnnnnnnnnnnnnnnnnnnnnnnnnnnnnnnnnnnnnnnnnnnnnnnnnnnnnnnnnnnnnnnnnnnnnnnnnnnnnnnnnnnnnnnnnnnnnnnnnnnnnnnnnnnnnnnnnnnnnnnnnnnnnnnnnnnnnnnnnnnnnnnnnnnnnnnnnnnnnnnnnnnnnnnnnnnnnnnnnnnnnnnnnnnnnnnnnnnnnnnnnnnnnnnnnnnnnnnnnnnnnnnnnnnnnnnnnnnnnnnnnnnnnnnnnnnnnnnnnnnnnnnnnnnnnnnnnnnnnnnnnnnnnnnnnnnnnnnnnnnnnnnnnnnnnnnnnnnnnnnnnnnnnnnnnnnnnnnnnnnnnnnnnnnnnnnnnnnnnnnnnnnnnnnnnnnnnnnnnnnnnnnnnnnnnnnnnnnnnnnnnnnnnnnnnnnnnnnnnnnnnnnnnnnnnnnnnnnnnnnnnnnnnnnnnnnnnnnnnnnnnnnnnnnnnnnnnnnnnnnnnnnnnnnnnnnnnnnnnnnnnnnnnnnnnnnnnnnnnnnnnnnnnnnnnnnnnnnnnnnnnnnnnnnnnnnnnnnnnnnnnnnnnnnnnnnnnnnnnnnnnnnnnnnnnnnnnnnnnnnnnnnnnnnnnnnnnnnnnnnnnnnnnnnnnnnnnnnnnnnnnnnnnnnnnnnnnnnnnnnnnnnnnnnnnnnnnnnnnnnnnnnnnnnnnnnnnnnnnnnnnnnnnnnnnnnnnnnnnnnnnnnnnnnnnnnnnnnnnnnnnnnnnnnnnnnnnnnnnnnnnnnnnnnnnnnnnnnnnnnnnnnnnnnnnnnnnnnnnnnnnnnnnnnnnnnnnnnnnnnnnnnnnnnnnnnnnnnnnnnnnnnnnnnnnnnnnnnnnnnnnnnnnnnnnnnnnnnnnnnnnnnnnnnnnnnnnnnnnnnnnnnnnnnnnnnnnnnnnnnnnnnnnnnnnnnnnnnnnnnnnnnnnnnnnnnnnnnnnnnnnnnnnnnnnnnnnnnnnnnnnnnnnnnnnnnnnnnnnnnnnnnnnnnnnnnnnnnnnnnnnnnnnnnnnnnnnnnnnnnnnnnnnnnnnnnnnnnnnnnnnnnnnnnnnnnnnnnnnnnnnnnnnnnnnnnnnnnnnnnnnnnnnnnnnnnnnnnnnnnnnnnnnnnnnnnnnnnnnnnnnnnnnnnnnnnnnnnnnnnnnnnnnnnnnnnnnnnnnnnnnnnnnnnnnnnnnnnnnnnnnnnnnnnnnnnnnnnnnnnnnnnnnnnnnnnnnnnnnnnnnnnnnnnnnnnnnnnnnnnnnnnnnnnnnnnnnnnnnnnnnnnnnnnnnnnnnnnnnnnnnnnnnnnnnnnnnnnnnnnnnnnnnnnnnnnnnnnnnnnnnnnnnnnnnnnnnnnnnnnnnnnnnnnnnnnnnnnnnnnnnnnnnnnnnnnnnnnnnnnnnnnnnnnnnnnnnnnnnnnnnnnnnnnnnnnnnnnnnnnnnnnnnnnnnnnnnnnnnnnnnnnnnnnnnnnnnnnnnnnnnnnnnnnnnnnnnnnnnnnnnnnnnnnnnnnnnnnnnnnnnnnnnnnnnnnnnnnnnnnnnnnnnnnnnnnnnnnnnnnnnnnnnnnnnnnnnnnnnnnnnnnnnnnnnnnnnnnnnnnnnnnnnnnnnnnnnnnnnnnnnnnnnnnnnnnnnnnnnnnnnnnnnnnnnnnnnnnnnnnnnnnnnnnnnnnnnnnnnnnnnnnnnnnnnnnnnnnnnnnnnnnnnnnnnnnnnnnnnnnnnnnnnnnnnnnnnnnnnnnnnnnnnnnnnnnnnnnnnnnnnnnnnnnnnnnnnnnnnnnnnnnnnnnnnnnnnnnnnnnnnnnnnnnnnnnnnnnnnnnnnnnnnnnnnnnnnnnnnnnnnnnnnnnnnnnnnnnnnnnnnnnnnnnnnnnnnnnnnnnnnnnnnnnnnnnnnnnnnnnnnnnnnnnnnnnnnnnnnnnnnnnnnnnnnnnnnnnnnnnnnnnnnnnnnnnnnnnnnnnnnnnnnnnnnnnnnnnnnnnnnnnnnnnnnnnnnnnnnnnnnnnnnnnnnnnnnnnnnnnnnnnnnnnnnnnnnnnnnnnnnnnnnnnnnnnnnnnnnnnnnnnnnnnnnnnnnnnnnnnnnnnnnnnnnnnnnnnnnnnnnnnnnnnnnnnnnnnnnnnnnnnnnnnnnnnnnnnnnnnnnnnnnnnnnnnnnnnnnnnnnnnnnnnnnnnnnnnnnnnnnnnnnnnnnnnnnnnnnnnnnnnnnnnnnnnnnnnnnnnnnnnnnnnnnnnnnnnnnnnnnnnnnnnnnnnnnnnnnnnnnnnnnnnnnnnnnnnnnnnnnnnnnnnnnnnnnnnnnnnnnnnnnnnnnnnnnnnnnnnnnnnnnnnnnnnnnnnnnnnnnnnnnnnnnnnnnnnnnnnnnnnnnnnnnnnnnnnnnnnnnnnnnnnnnnnnnnnnnnnnnnnnnnnnnnnnnnnnnnnnnnnnnnnnnnnnnnnnnnnnnnnnnnnnnnnnnnnnnnnnnnnnnnnnnnnnnnnnnnnnnnnnnnnnnnnnnnnnnnnnnnnnnnnnnnnnnnnnnnnnnnnnnnnnnnnnnnnnnnnnnnnnnnnnnnnnnnnnnnnnnnnnnnnnnnnnnnnnnnnnnnnnnnnnnnnnnnnnnnnnnnnnnnnnnnnnnnnnnnnnnnnnnnnnnnnnnnnnnnnnnnnnnnnnnnnnnnnnnnnnnnnnnnnnnnnnnnnnnnnnnnnnnnnnnnnnnnnnnnnnnnnnnnnnnnnnnnnnnnnnnnnnnnnnnnnnnnnnnnnnnnnnnnnnnnnnnnnnnnnnnnnnnnnnnnnnnnnnnnnnnnnnnnnnnnnnnnnnnnnnnnnnnnnnnnnnnnnnnnnnnnnnnnnnnnnnnnnnnnnnnnnnnnnnnnnnnnnnnnnnnnnnnnnnnnnnnnnnnnnnnnnnnnnnnnnnnnnnnnnnnnnnnnnnnnnnnnnnnnnnnnnnnnnnnnnnnnnnnnnnnnnnnnnnnnnnnnnnnnnnnnnnnnnnnnnnnnnnnnnnnnnnnnnnnnnnnnnnnnnnnnnnnnnnnnnnnnnnnnnnnnnnnnnnnnnnnnnnnnnnnnnnnnnnnnnnnnnnnnnnnnnnnnnnnnnnnnnnnnnnnnnnnnnnnnnnnnnnnnnnnnnnnnnnnnnnnnnnnnnnnnnnnnnnnnnnnnnnnnnnnnnnnnnnnnnnnnnnnnnnnnnnnnnnnnnnnnnnnnnnnnnnnnnnnnnnnnnnnnnnnnnnnnnnnnnnnnnnnnnnnnnnnnnnnnnnnnnnnnnnnnnnnnnnnnnnnnnnnnnnnnnnnnnnnnnnnnnnnnnnnnnnnnnnnnnnnnnnnnnnnnnnnnnnnnnnnnnnnnnnnnnnnnnnnnnnnnnnnnnnnnnnnnnnnnnnnnnnnnnnnnnnnnnnnnnnnnnnnnnnnnnnnnnnnnnnnnnnnnnnnnnnnnnnnnnnnnnnnnnnnnnnnnnnnnnnnnnnnnnnnnnnnnnnnnnnnnnnnnnnnnnnnnnnnnnnnnnnnnnnnnnnnnnnnnnnnnnnnnnnnnnnnnnnnnnnnnnnnnnnnnnnnnnnnnnnnnnnnnnnnnnnnnnnnnnnnnnnnnnnnnnnnnnnnnnnnnnnnnnnnnnnnnnnnnnnnnnnnnnnnnnnnnnnnnnnnnnnnnnnnnnnnnnnnnnnnnnnnnnnnnnnnnnnnnnnnnnnnnnnnnnnnnnnnnnnnnnnnnnnnnnnnnnnnnnnnnnnnnnnnnnnnnnnnnnnnnnnnnnnnnnnnnnnnnnnnnnnnnnnnnnnnnnnnnnnnnnnnnnnnnnnnnnnnnnnnnnnnnnnnnnnnnnnnnnnnnnnnnnnnnnnnnnnnnnnnnnnnnnnnnnnnnnnnnnnnnnnnnnnnnnnnnnnnnnnnnnnnnnnnnnnnnnnnnnnnnnnnnnnnnnnnnnnnnnnnnnnnnnnnnnnnnnnnnnnnnnnnnnnnnnnnnnnnnnnnnnnnnnnnnnnnnnnnnnnnnnnnnnnnnnnnnnnnnnnnnnnnnnnnnnnnnnnnnnnnnnnnnnnnnnnnnnnnnnnnnnnnnnnnnnnnnnnnnnnnnnnnnnnnnnnnnnnnnnnnnnnnnnnnnnnnnnnnnnnnnnnnnnnnnnnnnnnnnnnnnnnnnnnnnnnnnnnnnnnnnnnnnnnnnnnnnnnnnnnnnnnnnnnnnnnnnnnnnnnnnnnnnnnnnnnnnnnnnnnnnnnnnnnnnnnnnnnnnnnnnnnnnnnnnnnnnnnnnnnnnnnnnnnnnnnnnnnnnnnnnnnnnnnnnnnnnnnnnnnnnnnnnnnnnnnnnnnnnnnnnnnnnnnnnnnnnnnnnnnnnnnnnnnnnnnnnnnnnnnnnnnnnnnnnnnnnnnnnnnnnnnnnnnnnnnnnnnnnnnnnnnnnnnnnnnnnnnnnnnnnnnnnnnnnnnnnnnnnnnnnnnnnnnnnnnnnnnnnnnnnnnnnnnnnnnnnnnnnnnnnnnnnnnnnnnnnnnnnnnnnnnnnnnnnnnnnnnnnnnnnnnnnnnnnnnnnnnnnnnnnnnnnnnnnnnnnnnnnnnnnnnnnnnnnnnnnnnnnnnnnnnnnnnnnnnnnnnnnnnnnnnnnnnnnnnnnnnnnnnnnnnnnnnnnnnnnnnnnnnnnnnnnnnnnnnnnnnnnnnnnnnnnnnnnnnnnnnnnnnnnnnnnnnnnnnnnnnnnnnnnnnnnnnnnnnnnnnnnnnnnnnnnnnnnnnnnnnnnnnnnnnnnnnnnnnnnnnnnnnnnnnnnnnnnnnnnnnnnnnnnnnnnnnnnnnnnnnnnnnnnnnnnnnnnnnnnnnnnnnnnnnnnnnnnnnnnnnnnnnnnnnnnnnnnnnnnnnnnnnnnnnnnnnnnnnnnnnnnnnnnnnnnnnnnnnnnnnnnnnnnnnnnnnnnnnnnnnnnnnnnnnnnnnnnnnnnnnnnnnnnnnnnnnnnnnnnnnnnnnnnnnnnnnnnnnnnnnnnnnnnnnnnnnnnnnnnnnnnnnnnnnnnnnnnnnnnnnnnnnnnnnnnnnnnnnnnnnnnnnnnnnnnnnnnnnnnnnnnnnnnnnnnnnnnnnnnnnnnnnnnnnnnnnnnnnnnnnnnnnnnnnnnnnnnnnnnnnnnnnnnnnnnnnnnnnnnnnnnnnnnnnnnnnnnnnnnnnnnnnnnnnnnnnnnnnnnnnnnnnnnnnnnnnnnnnnnnnnnnnnnnnnnnnnnnnnnnnnnnnnnnnnnnnnnnnnnnnnnnnnnnnnnnnnnnnnnnnnnnnnnnnnnnnnnnnnnnnnnnnnnnnnnnnnnnnnnnnnnnnnnnnnnnnnnnnnnnnnnnnnnnnnnnnnnnnnnnnnnnnnnnnnnnnnnnnnnnnnnnnnnnnnnnnnnnnnnnnnnnnnnnnnnnnnnnnnnnnnnnnnnnnnnnnnnnnnnnnnnnnnnnnnnnnnnnnnnnnnnnnnnnnnnnnnnnnnnnnnnnnnnnnnnnnnnnnnnnnnnnnnnnnnnnnnnnnnnnnnnnnnnnnnnnnnnnnnnnnnnnnnnnnnnnnnnnnnnnnnnnnnnnnnnnnnnnnnnnnnnnnnnnnnnnnnnnnnnnnnnnnnnnnnnnnnnnnnnnnnnnnnnnnnnnnnnnnnnnnnnnnnnnnnnnnnnnnnnnnnnnnnnnnnnnnnnnnnnnnnnnnnnnnnnnnnnnnnnnnnnnnnnnnnnnnnnnnnnnnnnnnnnnnnnnnnnnnnnnnnnnnnnnnnnnnnnnnnnnnnnnnnnnnnnnnnnnnnnnnnnnnnnnnnnnnnnnnnnnnnnnnnnnnnnnnnnnnnnnnnnnnnnnnnnnnnnnnnnnnnnnnnnnnnnnnnnnnnnnnnnnnnnnnnnnnnnnnnnnnnnnnnnnnnnnnnnnnnnnnnnnnnnnnnnnnnnnnnnnnnnnnnnnnnnnnnnnnnnnnnnnnnnnnnnnnnnnnnnnnnnnnnnnnnnnnnnnnnnnnnnnnnnnnnnnnnnnnnnnnnnnnnnnnnnnnnnnnnnnnnnnnnnnnnnnnnnnnnnnnnnnnnnnnnnnnnnnnnnnnnnnnnnnnnnnnnnnnnnnnnnnnnnnnnnnnnnnnnnnnnnnnnnnnnnnnnnnnnnnnnnnnnnnnnnnnnnnnnnnnnnnnnnnnnnnnnnnnnnnnnnnnnnnnnnnnnnnnnnnnnnnnnnnnnnnnnnnnnnnnnnnnnnnnnnnnnnnnnnnnnnnnnnnnnnnnnnnnnnnnnnnnnnnnnnnnnnnnnnnnnnnnnnnnnnnnnnnnnnnnnnnnnnnnnnnnnnnnnnnnnnnnnnnnnnnnnnnnnnnnnnnnnnnnnnnnnnnnnnnnnnnnnnnnnnnnnnnnnnnnnnnnnnnnnnnnnnnnnnnnnnnnnnnnnnnnnnnnnnnnnnnnnnnnnnnnnnnnnnnnnnnnnnnnnnnnnnnnnnnnnnnnnnnnnnnnnnnnnnnnnnnnnnnnnnnnnnnnnnnnnnnnnnnnnnnnnnnnnnnnnnnnnnnnnnnnnnnnnnnnnnnnnnnnnnnnnnnnnnnnnnnnnnnnnnnnnnnnnnnnnnnnnnnnnnnnnnnnnnnnnnnnnnnnnnnnnnnnnnnnnnnnnnnnnnnnnnnnnnnnnnnnnnnnnnnnnnnnnnnnnnnnnnnnnnnnnnnnnnnnnnnnnnnnnnnnnnnnnnnnnnnnnnnnnnnnnnnnnnnnnnnnnnnnnnnnnnnnnnnnnnnnnnnnnnnnnnnnnnnnnnnnnnnnnnnnnnnnnnnnnnnnnnnnnnnnnnnnnnnnnnnnnnnnnnnnnnnnnnnnnnnnnnnnnnnnnnnnnnnnnnnnnnnnnnnnnnnnnnnnnnnnnnnnnnnnnnnnnnnnnnnnnnnnnnnnnnnnnnnnnnnnnnnnnnnnnnnnnnnnnnnnnnnnnnnnnnnnnnnnnnnnnnnnnnnnnnnnnnnnnnnnnnnnnnnnnnnnnnnnnnnnnnnnnnnnnnnnnnnnnnnnnnnnnnnnnnnnnnnnnnnnnnnnnnnnnnnnnnnnnnnnnnnnnnnnnnnnnnnnnnnnnnnnnnnnnnnnnnnnnnnnnnnnnnnnnnnnnnnnnnnnnnnnnnnnnnnnnnnnnnnnnnnnnnnnnnnnnnnnnnnnnnnnnnnnnnnnnnnnnnnnnnnnnnnnnnnnnnnnnnnnnnnnnnnnnnnnnnnnnnnnnnnnnnnnnnnnnnnnnnnnnnnnnnnnnnnnnnnnnnnnnnnnnnnnnnnnnnnnnnnnnnnnnnnnnnnnnnnnnnnnnnnnnnnnnnnnnnnnnnnnnnnnnnnnnnnnnnnnnnnnnnnnnnnnnnnnnnnnnnnnnnnnnnnnnnnnnnnnnnnnnnnnnnnnnnnnnnnnnnnnnnnnnnnnnnnnnnnnnnnnnnnnnnnnnnnnnnnnnnnnnnnnnnnnnnnnnnnnnnnnnnnnnnnnnnnnnnnnnnnnnnnnnnnnnnnnnnnnnnnnnnnnnnnnnnnnnnnnnnnnnnnnnnnnnnnnnnnnnnnnnnnnnnnnnnnnnnnnnnnnnnnnnnnnnnnnnnnnnnnnnnnnnnnnnnnnnnnnnnnnnnnnnnnnnnnnnnnnnnnnnnnnnnnnnnnnnnnnnnnnnnnnnnnnnnnnnnnnnnnnnnnnnnnnnnnnnnnnnnnnnnnnnnnnnnnnnnnnnnnnnnnnnnnnnnnnnnnnnnnnnnnnnnnnnnnnnnnnnnnnnnnnnnnnnnnnnnnnnnnnnnnnnnnnnnnnnnnnnnnnnnnnnnnnnnnnnnnnnnnnnnnnnnnnnnnnnnnnnnnnnnnnnnnnnnnnnnnnnnnnnnnnnnnnnnnnnnnnnnnnnnnnnnnnnnnnnnnnnnnnnnnnnnnnnnnnnnnnnnnnnnnnnnnnnnnnnnnnnnnnnnnnnnnnnnnnnnnnnnnnnnnnnnnnnnnnnnnnnnnnnnnnnnnnnnnnnnnnnnnnnnnnnnnnnnnnnnnnnnnnnnnnnnnnnnnnnnnnnnnnnnnnnnnnnnnnnnnnnnnnnnnnnnnnnnnnnnnnnnnnnnnnnnnnnnnnnnnnnnnnnnnnnnnnnnnnnnnnnnnnnnnnnnnnnnnnnnnnnnnnnnnnnnnnnnnnnnnnnnnnnnnnnnnnnnnnnnnnnnnnnnnnnnnnnnnnnnnnnnnnnnnnnnnnnnnnnnnnnnnnnnnnnnnnnnnnnnnnnnnnnnnnnnnnnnnnnnnnnnnnnnnnnnnnnnnnnnnnnnnnnnnnnnnnnnnnnnnnnnnnnnnnnnnnnnnnnnnnnnnnnnnnnnnnnnnnnnnnnnnnnnnnnnnnnnnnnnnnnnnnnnnnnnnnnnnnnnnnnnnnnnnnnnnnnnnnnnnnnnnnnnnnnnnnnnnnnnnnnnnnnnnnnnnnnnnnnnnnnnnnnnnnnnnnnnnnnnnnnnnnnnnnnnnnnnnnnnnnnnnnnnnnnnnnnnnnnnnnnnnnnnnnnnnnnnnnnnnnnnnnnnnnnnnnnnnnnnnnnnnnnnnnnnnnnnnnnnnnnnnnnnnnnnnnnnnnnnnnnnnnnnnnnnnnnnnnnnnnnnnnnnnnnnnnnnnnnnnnnnnnnnnnnnnnnnnnnnnnnnnnnnnnnnnnnnnnnnnnnnnnnnnnnnnnnnnnnnnnnnnnnnnnnnnnnnnnnnnnnnnnnnnnnnnnnnnnnnnnnnnnnnnnnnnnnnnnnnnnnnnnnnnnnnnnnnnnnnnnnnnnnnnnnnnnnnnnnnnnnnnnnnnnnnnnnnnnnnnnnnnnnnnnnnnnnnnnnnnnnnnnnnnnnnnnnnnnnnnnnnnnnnnnnnnnnnnnnnnnnnnnnnnnnnnnnnnnnnnnnnnnnnnnnnnnnnnnnnnnnnnnnnnnnnnnnnnnnnnnnnnnnnnnnnnnnnnnnnnnnnnnnnnnnnnnnnnnnnnnnnnnnnnnnnnnnnnnnnnnnnnnnnnnnnnnnnnnnnnnnnnnnnnnnnnnnnnnnnnnnnnnnnnnnnnnnnnnnnnnnnnnnnnnnnnnnnnnnnnnnnnnnnnnnnnnnnnnnnnnnnnnnnnnnnnnnnnnnnnnnnnnnnnnnnnnnnnnnnnnnnnnnnnnnnnnnnnnnnnnnnnnnnnnnnnnnnnnnnnnnnnnnnnnnnnnnnnnnnnnnnnnnnnnnnnnnnnnnnnnnnnnnnnnnnnnnnnnnnnnnnnnnnnnnnnnnnnnnnnnnnnnnnnnnnnnnnnnnnnnnnnnnnnnnnnnnnnnnnnnnnnnnnnnnnnnnnnnnnnnnnnnnnnnnnnnnnnnnnnnnnnnnnnnnnnnnnnnnnnnnnnnnnnnnnnnnnnnnnnnnnnnnnnnnnnnnnnnnnnnnnnnnnnnnnnnnnnnnnnnnnnnnnnnnnnnnnnnnnnnnnnnnnnnnnnnnnnnnnnnnnnnnnnnnnnnnnnnnnnnnnnnnnnnnnnnnnnnnnnnnnnnnnnnnnnnnnnnnnnnnnnnnnnnnnnnnnnnnnnnnnnnnnnnnnnnnnnnnnnnnnnnnnnnnnnnnnnnnnnnnnnnnnnnnnnnnnnnnnnnnnnnnnnnnnnnnnnnnnnnnnnnnnnnnnnnnnnnnnnnnnnnnnnnnnnnnnnnnnnnnnnnnnnnnnnnnnnnnnnnnnnnnnnnnnnnnnnnnnnnnnnnnnnnnnnnnnnnnnnnnnnnnnnnnnnnnnnnnnnnnnnnnnnnnnnnnnnnnnnnnnnnnnnnnnnnnnnnnnnnnnnnnnnnnnnnnnnnnnnnnnnnnnnnnnnnnnnnnnnnnnnnnnnnnnnnnnnnnnnnnnnnnnnnnnnnnnnnnnnnnnnnnnnnnnnnnnnnnnnnnnnnnnnnnnnnnnnnnnnnnnnnnnnnnnnnnnnnnnnnnnnnnnnnnnnnnnnnnnnnnnnnnnnnnnnnnnnnnnnnnnnnnnnnnnnnnnnnnnnnnnnnnnnnnnnnnnnnnnnnnnnnnnnnnnnnnnnnnnnnnnnnnnnnnnnnnnnnnnnnnnnnnnnnnnnnnnnnnnnnnnnnnnnnnnnnnnnnnnnnnnnnnnnnnnnnnnnnnnnnnnnnnnnnnnnnnnnnnnnnnnnnnnnnnnnnnnnnnnnnnnnnnnnnnnnnnnnnnnnnnnnnnnnnnnnnnnnnnnnnnnnnnnnnnnnnnnnnnnnnnnnnnnnnnnnnnnnnnnnnnnnnnnnnnnnnnnnnnnnnnnnnnnnnnnnnnnnnnnnnnnnnnnnnnnnnnnnnnnnnnnnnnnnnnnnnnnnnnnnnnnnnnnnnnnnnnnnnnnnnnnnnnnnnnnnnnnnnnnnnnnnnnnnnnnnnnnnnnnnnnnnnnnnnnnnnnnnnnnnnnnnnnnnnnnnnnnnnnnnnnnnnnnnnnnnnnnnnnnnnnnnnnnnnnnnnnnnnnnnnnnnnnnnnnnnnnnnnnnnnnnnnnnnnnnnnnnnnnnnnnnnnnnnnnnnnnnnnnnnnnnnnnnnnnnnnnnnnnnnnnnnnnnnnnnnnnnnnnnnnnnnnnnnnnnnnnnnnnnnnnnnnnnnnnnnnnnnnnnnnnnnnnnnnnnnnnnnnnnnnnnnnnnnnnnnnnnnnnnnnnnnnnnnnnnnnnnnnnnnnnnnnnnnnnnnnnnnnnnnnnnnnnnnnnnnnnnnnnnnnnnnnnnnnnnnnnnnnnnnnnnnnnnnnnnnnnnnnnnnnnnnnnnnnnnnnnnnnnnnnnnnnnnnnnnnnnnnnnnnnnnnnnnnnnnnnnnnnnnnnnnnnnnnnnnnnnnnnnnnnnnnnnnnnnnnnnnnnnnnnnnnnnnnnnnnnnnnnnnnnnnnnnnnnnnnnnnnnnnnnnnnnnnnnnnnnnnnnnnnnnnnnnnnnnnnnnnnnnnnnnnnnnnnnnnnnnnnnnnnnnnnnnnnnnnnnnnnnnnnnnnnnnnnnnnnnnnnnnnnnnnnnnnnnnnnnnnnnnnnnnnnnnnnnnnnnnnnnnnnnnnnnnnnnnnnnnnnnnnnnnnnnnnnnnnnnnnnnnnnnnnnnnnnnnnnnnnnnnnnnnnnnnnnnnnnnnnnnnnnnnnnnnnnnnnnnnnnnnnnnnnnnnnnnnnnnnnnnnnnnnnnnnnnnnnnnnnnnnnnnnnnnnnnnnnnnnnnnnnnnnnnnnnnnnnnnnnnnnnnnnnnnnnnnnnnnnnnnnnnnnnnnnnnnnnnnnnnnnnnnnnnnnnnnnnnnnnnnnnnnnnnnnnnnnnnnnnnnnnnnnnnnnnnnnnnnnnnnnnnnnnnnnnnnnnnnnnnnnnnnnnnnnnnnnnnnnnnnnnnnnnnnnnnnnnnnnnnnnnnnnnnnnnnnnnnnnnnnnnnnnnnnnnnnnnnnnnnnnnnnnnnnnnnnnnnnnnnnnnnnnnnnnnnnnnnnnnnnnnnnnnnnnnnnnnnnnnnnnnnnnnnnnnnnnnnnnnnnnnnnnnnnnnnnnnnnnnnnnnnnnnnnnnnnnnnnnnnnnnnnnnnnnnnnnnnnnnnnnnnnnnnnnnnnnnnnnnnnnnnnnnnnnnnnnnnnnnnnnnnnnnnnnnnnnnnnnnnnnnnnnnnnnnnnnnnnnnnnnnnnnnnnnnnnnnnnnnnnnnnnnnnnnnnnnnnnnnnnnnnnnnnnnnnnnnnnnnnnnnnnnnnnnnnnnnnnnnnnnnnnnnnnnnnnnnnnnnnnnnnnnnnnnnnnnnnnnnnnnnnnnnnnnnnnnnnnnnnnnnnnnnnnnnnnnnnnnnnnnnnnnnnnnnnnnnnnnnnnnnnnnnnnnnnnnnnnnnnnnnnnnnnnnnnnnnnnnnnnnnnnnnnnnnnnnnnnnnnnnnnnnnnnnnnnnnnnnnnnnnnnnnnnnnnnnnnnnnnnnnnnnnnnnnnnnnnnnnnnnnnnnnnnnnnnnnnnnnnnnnnnnnnnnnnnnnnnnnnnnnnnnnnnnnnnnnnnnnnnnnnnnnnnnnnnnnnnnnnnnnnnnnnnnnnnnnnnnnnnnnnnnnnnnnnnnnnnnnnnnnnnnnnnnnnnnnnnnnnnnnnnnnnnnnnnnnnnnnnnnnnnnnnnnnnnnnnnnnnnnnnnnnnnnnnnnnnnnnnnnnnnnnnnnnnnnnnnnnnnnnnnnnnnnnnnnnnnnnnnnnnnnnnnnnnnnnnnnnnnnnnnnnnnnnnnnnnnnnnnnnnnnnnnnnnnnnnnnnnnnnnnnnnnnnnnnnnnnnnnnnnnnnnnnnnnnnnnnnnnnnnnnnnnnnnnnnnnnnnnnnnnnnnnnnnnnnnnnnnnnnnnnnnnnnnnnnnnnnnnnnnnnnnnnnnnnnnnnnnnnnnnnnnnnnnnnnnnnnnnnnnnnnnnnnnnnnnnnnnnnnnnnnnnnnnnnnnnnnnnnnnnnnnnnnnnnnnnnnnnnnnnnnnnnnnnnnnnnnnnnnnnnnnnnnnnnnnnnnnnnnnnnnnnnnnnnnnnnnnnnnnnnnnnnnnnnnnnnnnnnnnnnnnnnnnnnnnnnnnnnnnnnnnnnnnnnnnnnnnnnnnnnnnnnnnnnnnnnnnnnnnnnnnnnnnnnnnnnnnnnnnnnnnnnnnnnnnnnnnnnnnnnnnnnnnnnnnnnnnnnnnnnnnnnnnnnnnnnnnnnnnnnnnnnnnnnnnnnnnnnnnnnnnnnnnnnnnnnnnnnnnnnnnnnnnnnnnnnnnnnnnnnnnnnnnnnnnnnnnnnnnnnnnnnnnnnnnnnnnnnnnnnnnnnnnnnnnnnnnnnnnnnnnnnnnnnnnnnnnnnnnnnnnnnnnnnnnnnnnnnnnnnnnnnnnnnnnnnnnnnnnnnnnnnnnnnnnnnnnnnnnnnnnnnnnnnnnnnnnnnnnnnnnnnnnnnnnnnnnnnnnnnnnnnnnnnnnnnnnnnnnnnnnnnnnnnnnnnnnnnnnnnnnnnnnnnnnnnnnnnnnnnnnnnnnnnnnnnnnnnnnnnnnnnnnnnnnnnnnnnnnnnnnnnnnnnnnnnnnnnnnnnnnnnnnnnnnnnnnnnnnnnnnnnnnnnnnnnnnnnnnnnnnnnnnnnnnnnnnnnnnnnnnnnnnnnnnnnnnnnnnnnnnnnnnnnnnnnnnnnnnnnnnnnnnnnnnnnnnnnnnnnnnnnnnnnnnnnnnnnnnnnnnnnnnnnnnnnnnnnnnnnnnnnnnnnnnnnnnnnnnnnnnnnnnnnnnnnnnnnnnnnnnnnnnnnnnnnnnnnnnnnnnnnnnnnnnnnnnnnnnnnnnnnnnnnnnnnnnnnnnnnnnnnnnnnnnnnnnnnnnnnnnnnnnnnnnnnnnnnnnnnnnnnnnnnnnnnnnnnnnnnnnnnnnnnnnnnnnnnnnnnnnnnnnnnnnnnnnnnnnnnnnnnnnnnnnnnnnnnnnnnnnnnnnnnnnnnnnnnnnnnnnnnnnnnnnnnnnnnnnnnnnnnnnnnnnnnnnnnnnnnnnnnnnnnnnnnnnnnnnnnnnnnnnnnnnnnnnnnnnnnnnnnnnnnnnnnnnnnnnnnnnnnnnnnnnnnnnnnnnnnnnnnnnnnnnnnnnnnnnnnnnnnnnnnnnnnnnnnnnnnnnnnnnnnnnnnnnnnnnnnnnnnnnnnnnnnnnnnnnnnnnnnnnnnnnnnnnnnnnnnnnnnnnnnnnnnnnnnnnnnnnnnnnnnnnnnnnnnnnnnnnnnnnnnnnnnnnnnnnnnnnnnnnnnnnnnnnnnnnnnnnnnnnnnnnnnnnnnnnnnnnnnnnnnnnnnnnnnnnnnnnnnnnnnnnnnnnnnnnnnnnnnnnnnnnnnnnnnnnnnnnnnnnnnnnnnnnnnnnnnnnnnnnnnnnnnnnnnnnnnnnnnnnnnnnnnnnnnnnnnnnnnnnnnnnnnnnnnnnnnnnnnnnnnnnnnnnnnnnnnnnnnnnnnnnnnnnnnnnnnnnnnnnnnnnnnnnnnnnnnnnnnnnnnnnnnnnnnnnnnnnnnnnnnnnnnnnnnnnnnnnnnnnnnnnnnnnnnnnnnnnnnnnnnnnnnnnnnnnnnnnnnnnnnnnnnnnnnnnnnnnnnnnnnnnnnnnnnnnnnnnnnnnnnnnnnnnnnnnnnnnnnnnnnnnnnnnnnnnnnnnnnnnnnnnnnnnnnnnnnnnnnnnnnnnnnnnnnnnnnnnnnnnnnnnnnnnnnnnnnnnnnnnnnnnnnnnnnnnnnnnnnnnnnnnnnnnnnnnnnnnnnnnnnnnnnnnnnnnnnnnnnnnnnnnnnnnnnnnnnnnnnnnnnnnnnnnnnnnnnnnnnnnnnnnnnnnnnnnnnnnnnnnnnnnnnnnnnnnnnnnnnnnnnnnnnnnnnnnnnnnnnnnnnnnnnnnnnnnnnnnnnnnnnnnnnnnnnnnnnnnnnnnnnnnnnnnnnnnnnnnnnnnnnnnnnnnnnnnnnnnnnnnnnnnnnnnnnnnnnnnnnnnnnnnnnnnnnnnnnnnnnnnnnnnnnnnnnnnnnnnnnnnnnnnnnnnnnnnnnnnnnnnnnnnnnnnnnnnnnnnnnnnnnnnnnnnnnnnnnnnnnnnnnnnnnnnnnnnnnnnnnnnnnnnnnnnnnnnnnnnnnnnnnnnnnnnnnnnnnnnnnnnnnnnnnnnnnnnnnnnnnnnnnnnnnnnnnnnnnnnnnnnnnnnnnnnnnnnnnnnnnnnnnnnnnnnnnnnnnnnnnnnnnnnnnnnnnnnnnnnnnnnnnnnnnnnnnnnnnnnnnnnnnnnnnnnnnnnnnnnnnnnnnnnnnnnnnnnnnnnnnnnnnnnnnnnnnnnnnnnnnnnnnnnnnnnnnnnnnnnnnnnnnnnnnnnnnnnnnnnnnnnnnnnnnnnnnnnnnnnnnnnnnnnnnnnnnnnnnnnnnnnnnnnnnnnnnnnnnnnnnnnnnnnnnnnnnnnnnnnnnnnnnnnnnnnnnnnnnnnnnnnnnnnnnnnnnnnnnnnnnnnnnnnnnnnnnnnnnnnnnnnnnnnnnnnnnnnnnnnnnnnnnnnnnnnnnnnnnnnnnnnnnnnnnnnnnnnnnnnnnnnnnnnnnnnnnnnnnnnnnnnnnnnnnnnnnnnnnnnnnnnnnnnnnnnnnnnnnnnnnnnnnnnnnnnnnnnnnnnnnnnnnnnnnnnnnnnnnnnnnnnnnnnnnnnnnnnnnnnnnnnnnnnnnnnnnnnnnnnnnnnnnnnnnnnnnnnnnnnnnnnnnnnnnnnnnnnnnnnnnnnnnnnnnnnnnnnnnnnnnnnnnnnnnnnnnnnnnnnnnnnnnnnnnnnnnnnnnnnnnnnnnnnnnnnnnnnnnnnnnnnnnnnnnnnnnnnnnnnnnnnnnnnnnnnnnnnnnnnnnnnnnnnnnnnnnnnnnnnnnnnnnnnnnnnnnnnnnnnnnnnnnnnnnnnnnnnnnnnnnnnnnnnnnnnnnnnnnnnnnnnnnnnnnnnnnnnnnnnnnnnnnnnnnnnnnnnnnnnnnnnnnnnnnnnnnnnnnnnnnnnnnnnnnnnnnnnnnnnnnnnnnnnnnnnnnnnnnnnnnnnnnnnnnnnnnnnnnnnnnnnnnnnnnnnnnnnnnnnnnnnnnnnnnnnnnnnnnnnnnnnnnnnnnnnnnnnnnnnnnnnnnnnnnnnnnnnnnnnnnnnnnnnnnnnnnnnnnnnnnnnnnnnnnnnnnnnnnnnnnnnnnnnnnnnnnnnnnnnnnnnnnnnnnnnnnnnnnnnnnnnnnnnnnnnnnnnnnnnnnnnnnnnnnnnnnnnnnnnnnnnnnnnnnnnnnnnnnnnnnnnnnnnnnnnnnnnnnnnnnnnnnnnnnnnnnnnnnnnnnnnnnnnnnnnnnnnnnnnnnnnnnnnnnnnnnnnnnnnnnnnnnnnnnnnnnnnnnnnnnnnnnnnnnnnnnnnnnnnnnnnnnnnnnnnnnnnnnnnnnnnnnnnnnnnnnnnnnnnnnnnnnnnnnnnnnnnnnnnnnnnnnnnnnnnnnnnnnnnnnnnnnnnnnnnnnnnnnnnnnnnnnnnnnnnnnnnnnnnnnnnnnnnnnnnnnnnnnnnnnnnnnnnnnnnnnnnnnnnnnnnnnnnnnnnnnnnnnnnnnnnnnnnnnnnnnnnnnnnnnnnnnnnnnnnnnnnnnnnnnnnnnnnnnnnnnnnnnnnnnnnnnnnnnnnnnnnnnnnnnnnnnnnnnnnnnnnnnnnnnnnnnnnnnnnnnnnnnnnnnnnnnnnnnnnnnnnnnnnnnnnnnnnnnnnnnnnnnnnnnnnnnnnnnnnnnnnnnnnnnnnnnnnnnnnnnnnnnnnnnnnnnnnnnnnnnnnnnnnnnnnnnnnnnnnnnnnnnnnnnnnnnnnnnnnnnnnnnnnnnnnnnnnnnnnnnnnnnnnnnnnnnnnnnnnnnnnnnnnnnnnnnnnnnnnnnnnnnnnnnnnnnnnnnnnnnnnnnnnnnnnnnnnnnnnnnnnnnnnnnnnnnnnnnnnnnnnnnnnnnnnnnnnnnnnnnnnnnnnnnnnnnnnnnnnnnnnnnnnnnnnnnnnnnnnnnnnnnnnnnnnnnnnnnnnnnnnnnnnnnnnnnnnnnnnnnnnnnnnnnnnnnnnnnnnnnnnnnnnnnnnnnnnnnnnnnnnnnnnnnnnnnnnnnnnnnnnnnnnnnnnnnnnnnnnnnnnnnnnnnnnnnnnnnnnnnnnnnnnnnnnnnnnnnnnnnnnnnnnnnnnnnnnnnnnnnnnnnnnnnnnnnnnnnnnnnnnnnnnnnnnnnnnnnnnnnnnnnnnnnnnnnnnnnnnnnnnnnnnnnnnnnnnnnnnnnnnnnnnnnnnnnnnnnnnnnnnnnnnnnnnnnnnnnnnnnnnnnnnnnnnnnnnnnnnnnnnnnnnnnnnnnnnnnnnnnnnnnnnnnnnnnnnnnnnnnnnnnnnnnnnnnnnnnnnnnnnnnnnnnnnnnnnnnnnnnnnnnnnnnnnnnnnnnnnnnnnnnnnnnnnnnnnnnnnnnnnnnnnnnnnnnnnnnnnnnnnnnnnnnnnnnnnnnnnnnnnnnnnnnnnnnnnnnnnnnnnnnnnnnnnnnnnnnnnnnnnnnnnnnnnnnnnnnnnnnnnnnnnnnnnnnnnnnnnnnnnnnnnnnnnnnnnnnnnnnnnnnnnnnnnnnnnnnnnnnnnnnnnnnnnnnnnnnnnnnnnnnnnnnnnnnnnnnnnnnnnnnnnnnnnnnnnnnnnnnnnnnnnnnnnnnnnnnnnnnnnnnnnnnnnnnnnnnnnnnnnnnnnnnnnnnnnnnnnnnnnnnnnnnnnnnnnnnnnnnnnnnnnnnnnnnnnnnnnnnnnnnnnnnnnnnnnnnnnnnnnnnnnnnnnnnnnnnnnnnnnnnnnnnnnnnnnnnnnnnnnnnnnnnnnnnnnnnnnnnnnnnnnnnnnnnnnnnnnnnnnnnnnnnnnnnnnnnnnnnnnnnnnnnnnnnnnnnnnnnnnnnnnnnnnnnnnnnnnnnnnnnnnnnnnnnnnnnnnnnnnnnnnnnnnnnnnnnnnnnnnnnnnnnnnnnnnnnnnnnnnnnnnnnnnnnnnnnnnnnnnnnnnnnnnnnnnnnnnnnnnnnnnnnnnnnnnnnnnnnnnnnnnnnnnnnnnnnnnnnnnnnnnnnnnnnnnnnnnnnnnnnnnnnnnnnnnnnnnnnnnnnnnnnnnnnnnnnnnnnnnnnnnnnnnnnnnnnnnnnnnnnnnnnnnnnnnnnnnnnnnnnnnnnnnnnnnnnnnnnnnnnnnnnnnnnnnnnnnnnnnnnnnnnnnnnnnnnnnnnnnnnnnnnnnnnnnnnnnnnnnnnnnnnnnnnnnnnnnnnnnnnnnnnnnnnnnnnnnnnnnnnnnnnnnnnnnnnnnnnnnnnnnnnnnnnnnnnnnnnnnnnnnnnnnnnnnnnnnnnnnnnnnnnnnnnnnnnnnnnnnnnnnnnnnnnnnnnnnnnnnnnnnnnnnnnnnnnnnnnnnnnnnnnnnnnnnnnnnnnnnnnnnnnnnnnnnnnnnnnnnnnnnnnnnnnnnnnnnnnnnnnnnnnnnnnnnnnnnnnnnnnnnnnnnnnnnnnnnnnnnnnnnnnnnnnnnnnnnnnnnnnnnnnnnnnnnnnnnnnnnnnnnnnnnnnnnnnnnnnnnnnnnnnnnnnnnnnnnnnnnnnnnnnnnnnnnnnnnnnnnnnnnnnnnnnnnnnnnnnnnnnnnnnnnnnnnnnnnnnnnnnnnnnnnnnnnnnnnnnnnnnnnnnnnnnnnnnnnnnnnnnnnnnnnnnnnnnnnnnnnnnnnnnnnnnnnnnnnnnnnnnnnnnnnnnnnnnnnnnnnnnnnnnnnnnnnnnnnnnnnnnnnnnnnnnnnnnnnnnnnnnnnnnnnnnnnnnnnnnnnnnnnnnnnnnnnnnnnnnnnnnnnnnnnnnnnnnnnnnnnnnnnnnnnnnnnnnnnnnnnnnnnnnnnnnnnnnnnnnnnnnnnnnnnnnnnnnnnnnnnnnnnnnnnnnnnnnnnnnnnnnnnnnnnnnnnnnnnnnnnnnnnnnnnnnnnnnnnnnnnnnnnnnnnnnnnnnnnnnnnnnnnnnnnnnnnnnnnnnnnnnnnnnnnnnnnnnnnnnnnnnnnnnnnnnnnnnnnnnnnnnnnnnnnnnnnnnnnnnnnnnnnnnnnnnnnnnnnnnnnnnnnnnnnnnnnnnnnnnnnnnnnnnnnnnnnnnnnnnnnnnnnnnnnnnnnnnnnnnnnnnnnnnnnnnnnnnnnnnnnnnnnnnnnnnnnnnnnnnnnnnnnnnnnnnnnnnnnnnnnnnnnnnnnnnnnnnnnnnnnnnnnnnnnnnnnnnnnnnnnnnnnnnnnnnnnnnnnnnnnnnnnnnnnnnnnnnnnnnnnnnnnnnnnnnnnnnnnnnnnnnnnnnnnnnnnnnnnnnnnnnnnnnnnnnnnnnnnnnnnnnnnnnnnnnnnnnnnnnnnnnnnnnnnnnnnnnnnnnnnnnnnnnnnnnnnnnnnnnnnnnnnnnnnnnnnnnnnnnnnnnnnnnnnnnnnnnnnnnnnnnnnnnnnnnnnnnnnnnnnnnnnnnnnnnnnnnnnnnnnnnnnnnnnnnnnnnnnnnnnnnnnnnnnnnnnnnnnnnnnnnnnnnnnnnnnnnnnnnnnnnnnnnnnnnnnnnnnnnnnnnnnnnnnnnnnnnnnnnnnnnnnnnnnnnnnnnnnnnnnnnnnnnnnnnnnnnnnnnnnnnnnnnnnnnnnnnnnnnnnnnnnnnnnnnnnnnnnnnnnnnnnnnnnnnnnnnnnnnnnnnnnnnnnnnnnnnnnnnnnnnnnnnnnnnnnnnnnnnnnnnnnnnnnnnnnnnnnnnnnnnnnnnnnnnnnnnnnnnnnnnnnnnnnnnnnnnnnnnnnnnnnnnnnnnnnnnnnnnnnnnnnnnnnnnnnnnnnnnnnnnnnnnnnnnnnnnnnnnnnnnnnnnnnnnnnnnnnnnnnnnnnnnnnnnnnnnnnnnnnnnnnnnnnnnnnnnnnnnnnnnnnnnnnnnnnnnnnnnnnnnnnnnnnnnnnnnnnnnnnnnnnnnnnnnnnnnnnnnnnnnnnnnnnnnnnnnnnnnnnnnnnnnnnnnnnnnnnnnnnnnnnnnnnnnnnnnnnnnnnnnnnnnnnnnnnnnnnnnnnnnnnnnnnnnnnnnnnnnnnnnnnnnnnnnnnnnnnnnnnnnnnnnnnnnnnnnnnnnnnnnnnnnnnnnnnnnnnnnnnnnnnnnnnnnnnnnnnnnnnnnnnnnnnnnnnnnnnnnnnnnnnnnnnnnnnnnnnnnnnnnnnnnnnnnnnnnnnnnnnnnnnnnnnnnnnnnnnnnnnnnnnnnnnnnnnnnnnnnnnnnnnnnnnnnnnnnnnnnnnnnnnnnnnnnnnnnnnnnnnnnnnnnnnnnnnnnnnnnnnnnnnnnnnnnnnnnnnnnnnnnnnnnnnnnnnnnnnnnnnnnnnnnnnnnnnnnnnnnnnnnnnnnnnnnnnnnnnnnnnnnnnnnnnnnnnnnnnnnnnnnnnnnnnnnnnnnnnnnnnnnnnnnnnnnnnnnnnnnnnnnnnnnnnnnnnnnnnnnnnnnnnnnnnnnnnnnnnnnnnnnnnnnnnnnnnnnnnnnnnnnnnnnnnnnnnnnnnnnnnnnnnnnnnnnnnnnnnnnnnnnnnnnnnnnnnnnnnnnnnnnnnnnnnnnnnnnnnnnnnnnnnnnnnnnnnnnnnnnnnnnnnnnnnnnnnnnnnnnnnnnnnnnnnnnnnnnnnnnnnnnnnnnnnnnnnnnnnnnnnnnnnnnnnnnnnnnnnnnnnnnnnnnnnnnnnnnnnnnnnnnnnnnnnnnnnnnnnnnnnnnnnnnnnnnnnnnnnnnnnnnnnnnnnnnnnnnnnnnnnnnnnnnnnnnnnnnnnnnnnnnnnnnnnnnnnnnnnnnnnnnnnnnnnnnnnnnnnnnnnnnnnnnnnnnnnnnnnnnnnnnnnnnnnnnnnnnnnnnnnnnnnnnnnnnnnnnnnnnnnnnnnnnnnnnnnnnnnnnnnnnnnnnnnnnnnnnnnnnnnnnnnnnnnnnnnnnnnnnnnnnnnnnnnnnnnnnnnnnnnnnnnnnnnnnnnnnnnnnnnnnnnnnnnnnnnnnnnnnnnnnnnnnnnnnnnnnnnnnnnnnnnnnnnnnnnnnnnnnnnnnnnnnnnnnnnnnnnnnnnnnnnnnnnnnnnnnnnnnnnnnnnnnnnnnnnnnnnnnnnnnnnnnnnnnnnnnnnnnnnnnnnnnnnnnnnnnnnnnnnnnnnnnnnnnnnnnnnnnnnnnnnnnnnnnnnnnnnnnnnnnnnnnnnnnnnnnnnnnnnnnnnnnnnnnnnnnnnnnnnnnnnnnnnnnnnnnnnnnnnnnnnnnnnnnnnnnnnnnnnnnnnnnnnnnnnnnnnnnnnnnnnnnnnnnnnnnnnnnnnnnnnnnnnnnnnnnnnnnnnnnnnnnnnnnnnnnnnnnnnnnnnnnnnnnnnnnnnnnnnnnnnnnnnnnnnnnnnnnnnnnnnnnnnnnnnnnnnnnnnnnnnnnnnnnnnnnnnnnnnnnnnnnnnnnnnnnnnnnnnnnnnnnnnnnnnnnnnnnnnnnnnnnnnnnnnnnnnnnnnnnnnnnnnnnnnnnnnnnnnnnnnnnnnnnnnnnnnnnnnnnnnnnnnnnnnnnnnnnnnnnnnnnnnnnnnnnnnnnnnnnnnnnnnnnnnnnnnnnnnnnnnnnnnnnnnnnnnnnnnnnnnnnnnnnnnnnnnnnnnnnnnnnnnnnnnnnnnnnnnnnnnnnnnnnnnnnnnnnnnnnnnnnnnnnnnnnnnnnnnnnnnnnnnnnnnnnnnnnnnnnnnnnnnnnnnnnnnnnnnnnnnnnnnnnnnnnnnnnnnnnnnnnnnnnnnnnnnnnnnnnnnnnnnnnnnnnnnnnnnnnnnnnnnnnnnnnnnnnnnnnnnnnnnnnnnnnnnnnnnnnnnnnnnnnnnnnnnnnnnnnnnnnnnnnnnnnnnnnnnnnnnnnnnnnnnnnnnnnnnnnnnnnnnnnnnnnnnnnnnnnnnnnnnnnnnnnnnnnnnnnnnnnnnnnnnnnnnnnnnnnnnnnnnnnnnnnnnnnnnnnnnnnnnnnnnnnnnnnnnnnnnnnnnnnnnnnnnnnnnnnnnnnnnnnnnnnnnnnnnnnnnnnnnnnnnnnnnnnnnnnnnnnnnnnnnnnnnnnnnnnnnnnnnnnnnnnnnnnnnnnnnnnnnnnnnnnnnnnnnnnnnnnnnnnnnnnnnnnnnnnnnnnnnnnnnnnnnnnnnnnnnnnnnnnnnnnnnnnnnnnnnnnnnnnnnnnnnnnnnnnnnnnnnnnnnnnnnnnnnnnnnnnnnnnnnnnnnnnnnnnnnnnnnnnnnnnnnnnnnnnnnnnnnnnnnnnnnnnnnnnnnnnnnnnnnnnnnnnnnnnnnnnnnnnnnnnnnnnnnnnnnnnnnnnnnnnnnnnnnnnnnnnnnnnnnnnnnnnnnnnnnnnnnnnnnnnnnnnnnnnnnnnnnnnnnnnnnnnnnnnnnnnnnnnnnnnnnnnnnnnnnnnnnnnnnnnnnnnnnnnnnnnnnnnnnnnnnnnnnnnnnnnnnnnnnnnnnnnnnnnnnnnnnnnnnnnnnnnnnnnnnnnnnnnnnnnnnnnnnnnnnnnnnnnnnnnnnnnnnnnnnnnnnnnnnnnnnnnnnnnnnnnnnnnnnnnnnnnnnnnnnnnnnnnnnnnnnnnnnnnnnnnnnnnnnnnnnnnnnnnnnnnnnnnnnnnnnnnnnnnnnnnnnnnnnnnnnnnnnnnnnnnnnnnnnnnnnnnnnnnnnnnnnnnnnnnnnnnnnnnnnnnnnnnnnnnnnnnnnnnnnnnnnnnnnnnnnnnnnnnnnnnnnnnnnnnnnnnnnnnnnnnnnnnnnnnnnnnnnnnnnnnnnnnnnnnnnnnnnnnnnnnnnnnnnnnnnnnnnnnnnnnnnnnnnnnnnnnnnnnnnnnnnnnnnnnnnnnnnnnnnnnnnnnnnnnnnnnnnnnnnnnnnnnnnnnnnnnnnnnnnnnnnnnnnnnnnnnnnnnnnnnnnnnnnnnnnnnnnnnnnnnnnnnnnnnnnnnnnnnnnnnnnnnnnnnnnnnnnnnnnnnnnnnnnnnnnnnnnnnnnnnnnnnnnnnnnnnnnnnnnnnnnnnnnnnnnnnnnnnnnnnnnnnnnnnnnnnnnnnnnnnnnnnnnnnnnnnnnnnnnnnnnnnnnnnnnnnnnnnnnnnnnnnnnnnnnnnnnnnnnnnnnnnnnnnnnnnnnnnnnnnnnnnnnnnnnnnnnnnnnnnnnnnnnnnnnnnnnnnnnnnnnnnnnnnnnnnnnnnnnnnnnnnnnnnnnnnnnnnnnnnnnnnnnnnnnnnnnnnnnnnnnnnnnnnnnnnnnnnnnnnnnnnnnnnnnnnnnnnnnnnnnnnnnnnnnnnnnnnnnnnnnnnnnnnnnnnnnnnnnnnnnnnnnnnnnnnnnnnnnnnnnnnnnnnnnnnnnnnnnnnnnnnnnnnnnnnnnnnnnnnnnnnnnnnnnnnnnnnnnnnnnnnnnnnnnnnnnnnnnnnnnnnnnnnnnnnnnnnnnnnnnnnnnnnnnnnnnnnnnnnnnnnnnnnnnnnnnnnnnnnnnnnnnnnnnnnnnnnnnnnnnnnnnnnnnnnnnnnnnnnnnnnnnnnnnnnnnnnnnnnnnnnnnnnnnnnnnnnnnnnnnnnnnnnnnnnnnnnnnnnnnnnnnnnnnnnnnnnnnnnnnnnnnnnnnnnnnnnnnnnnnnnnnnnnnnnnnnnnnnnnnnnnnnnnnnnnnnnnnnnnnnnnnnnnnnnnnnnnnnnnnnnnnnnnnnnnnnnnnnnnnnnnnnnnnnnnnnnnnnnnnnnnnnnnnnnnnnnnnnnnnnnnnnnnnnnnnnnnnnnnnnnnnnnnnnnnnnnnnnnnnnnnnnnnnnnnnnnnnnnnnnnnnnnnnnnnnnnnnnnnnnnnnnnnnnnnnnnnnnnnnnnnnnnnnnnnnnnnnnnnnnnnnnnnnnnnnnnnnnnnnnnnnnnnnnnnnnnnnnnnnnnnnnnnnnnnnnnnnnnnnnnnnnnnnnnnnnnnnnnnnnnnnnnnnnnnnnnnnnnnnnnnnnnnnnnnnnnnnnnnnnnnnnnnnnnnnnnnnnnnnnnnnnnnnnnnnnnnnnnnnnnnnnnnnnnnnnnnnnnnnnnnnnnnnnnnnnnnnnnnnnnnnnnnnnnnnnnnnnnnnnnnnnnnnnnnnnnnnnnnnnnnnnnnnnnnnnnnnnnnnnnnnnnnnnnnnnnnnnnnnnnnnnnnnnnnnnnnnnnnnnnnnnnnnnnnnnnnnnnnnnnnnnnnnnnnnnnnnnnnnnnnnnnnnnnnnnnnnnnnnnnnnnnnnnnnnnnnnnnnnnnnnnnnnnnnnnnnnnnnnnnnnnnnnnnnnnnnnnnnnnnnnnnnnnnnnnnnnnnnnnnnnnnnnnnnnnnnnnnnnnnnnnnnnnnnnnnnnnnnnnnnnnnnnnnnnnnnnnnnnnnnnnnnnnnnnnnnnnnnnnnnnnnnnnnnnnnnnnnnnnnnnnnnnnnnnnnnnnnnnnnnnnnnnnnnnnnnnnnnnnnnnnnnnnnnnnnnnnnnnnnnnnnnnnnnnnnnnnnnnnnnnnnnnnnnnnnnnnnnnnnnnnnnnnnnnnnnnnnnnnnnnnnnnnnnnnnnnnnnnnnnnnnnnnnnnnnnnnnnnnnnnnnnnnnnnnnnnnnnnnnnnnnnnnnnnnnnnnnnnnnnnnnnnnnnnnnnnnnnnnnnnnnnnnnnnnnnnnnnnnnnnnnnnnnnnnnnnnnnnnnnnnnnnnnnnnnnnnnnnnnnnnnnnnnnnnnnnnnnnnnnnnnnnnnnnnnnnnnnnnnnnnnnnnnnnnnnnnnnnnnnnnnnnnnnnnnnnnnnnnnnnnnnnnnnnnnnnnnnnnnnnnnnnnnnnnnnnnnnnnnnnnnnnnnnnnnnnnnnnnnnnnnnnnnnnnnnnnnnnnnnnnnnnnnnnnnnnnnnnnnnnnnnnnnnnnnnnnnnnnnnnnnnnnnnnnnnnnnnnnnnnnnnnnnnnnnnnnnnnnnnnnnnnnnnnnnnnnnnnnnnnnnnnnnnnnnnnnnnnnnnnnnnnnnnnnnnnnnnnnnnnnnnnnnnnnnnnnnnnnnnnnnnnnnnnnnnnnnnnnnnnnnnnnnnnnnnnnnnnnnnnnnnnnnnnnnnnnnnnnnnnnnnnnnnnnnnnnnnnnnnnnnnnnnnnnnnnnnnnnnnnnnnnnnnnnnnnnnnnnnnnnnnnnnnnnnnnnnnnnnnnnnnnnnnnnnnnnnnnnnnnnnnnnnnnnnnnnnnnnnnnnnnnnnnnnnnnnnnnnnnnnnnnnnnnnnnnnnnnnnnnnnnnnnnnnnnnnnnnnnnnnnnnnnnnnnnnnnnnnnnnnnnnnnnnnnnnnnnnnnnnnnnnnnnnnnnnnnnnnnnnnnnnnnnnnnnnnnnnnnnnnnnnnnnnnnnnnnnnnnnnnnnnnnnnnnnnnnnnnnnnnnnnnnnnnnnnnnnnnnnnnnnnnnnnnnnnnnnnnnnnnnnnnnnnnnnnnnnnnnnnnnnnnnnnnnnnnnnnnnnnnnnnnnnnnnnnnnnnnnnnnnnnnnnnnnnnnnnnnnnnnnnnnnnnnnnnnnnnnnnnnnnnnnnnnnnnnnnnnnnnnnnnnnnnnnnnnnnnnnnnnnnnnnnnnnnnnnnnnnnnnnnnnnnnnnnnnnnnnnnnnnnnnnnnnnnnnnnnnnnnnnnnnnnnnnnnnnnnnnnnnnnnnnnnnnnnnnnnnnnnnnnnnnnnnnnnnnnnnnnnnnnnnnnnnnnnnnnnnnnnnnnnnnnnnnnnnnnnnnnnnnnnnnnnnnnnnnnnnnnnnnnnnnnnnnnnnnnnnnnnnnnnnnnnnnnnnnnnnnnnnnnnnnnnnnnnnnnnnnnnnnnnnnnnnnnnnnnnnnnnnnnnnnnnnnnnnnnnnnnnnnnnnnnnnnnnnnnnnnnnnnnnnnnnnnnnnnnnnnnnnnnnnnnnnnnnnnnnnnnnnnnnnnnnnnnnnnnnnnnnnnnnnnnnnnnnnnnnnnnnnnnnnnnnnnnnnnnnnnnnnnnnnnnnnnnnnnnnnnnnnnnnnnnnnnnnnnnnnnnnnnnnnnnnnnnnnnnnnnnnnnnnnnnnnnnnnnnnnnnnnnnnnnnnnnnnnnnnnnnnnnnnnnnnnnnnnnnnnnnnnnnnnnnnnnnnnnnnnnnnnnnnnnnnnnnnnnnnnnnnnnnnnnnnnnnnnnnnnnnnnnnnnnnnnnnnnnnnnnnnnnnnnnnnnnnnnnnnnnnnnnnnnnnnnnnnnnnnnnnnnnnnnnnnnnnnnnnnnnnnnnnnnnnnnnnnnnnnnnnnnnnnnnnnnnnnnnnnnnnnnnnnnnnnnnnnnnnnnnnnnnnnnnnnnnnnnnnnnnnnnnnnnnnnnnnnnnnnnnnnnnnnnnnnnnnnnnnnnnnnnnnnnnnnnnnnnnnnnnnnnnnnnnnnnnnnnnnnnnnnnnnnnnnnnnnnnnnnnnnnnnnnnnnnnnnnnnnnnnnnnnnnnnnnnnnnnnnnnnnnnnnnnnnnnnnnnnnnnnnnnnnnnnnnnnnnnnnnnnnnnnnnnnnnnnnnnnnnnnnnnnnnnnnnnnnnnnnnnnnnnnnnnnnnnnnnnnnnnnnnnnnnnnnnnnnnnnnnnnnnnnnnnnnnnnnnnnnnnnnnnnnnnnnnnnnnnnnnnnnnnnnnnnnnnnnnnnnnnnnnnnnnnnnnnnnnnnnnnnnnnnnnnnnnnnnnnnnnnnnnnnnnnnnnnnnnnnnnnnnnnnnnnnnnnnnnnnnnnnnnnnnnnnnnnnnnnnnnnnnnnnnnnnnnnnnnnnnnnnnnnnnnnnnnnnnnnnnnnnnnnnnnnnnnnnnnnnnnnnnnnnnnnnnnnnnnnnnnnnnnnnnnnnnnnnnnnnnnnnnnnnnnnnnnnnnnnnnnnnnnnnnnnnnnnnnnnnnnnnnnnnnnnnnnnnnnnnnnnnnnnnnnnnnnnnnnnnnnnnnnnnnnnnnnnnnnnnnnnnnnnnnnnnnnnnnnnnnnnnnnnnnnnnnnnnnnnnnnnnnnnnnnnnnnnnnnnnnnnnnnnnnnnnnnnnnnnnnnnnnnnnnnnnnnnnnnnnnnnnnnnnnnnnnnnnnnnnnnnnnnnnnnnnnnnnnnnnnnnnnnnnnnnnnnnnnnnnnnnnnnnnnnnnnnnnnnnnnnnnnnnnnnnnnnnnnnnnnnnnnnnnnnnnnnnnnnnnnnnnnnnnnnnnnnnnnnnnnnnnnnnnnnnnnnnnnnnnnnnnnnnnnnnnnnnnnnnnnnnnnnnnnnnnnnnnnnnnnnnnnnnnnnnnnnnnnnnnnnnnnnnnnnnnnnnnnnnnnnnnnnnnnnnnnnnnnnnnnnnnnnnnnnnnnnnnnnnnnnnnnnnnnnnnnnnnnnnnnnnnnnnnnnnnnnnnnnnnnnnnnnnnnnnnnnnnnnnnnnnnnnnnnnnnnnnnnnnnnnnnnnnnnnnnnnnnnnnnnnnnnnnnnnnnnnnnnnnnnnnnnnnnnnnnnnnnnnnnnnnnnnnnnnnnnnnnnnnnnnnnnnnnnnnnnnnnnnnnnnnnnnnnnnnnnnnnnnnnnnnnnnnnnnnnnnnnnnnnnnnnnnnnnnnnnnnnnnnnnnnnnnnnnnnnnnnnnnnnnnnnnnnnnnnnnnnnnnnnnnnnnnnnnnnnnnnnnnnnnnnnnnnnnnnnnnnnnnnnnnnnnnnnnnnnnnnnnnnnnnnnnnnnnnnnnnnnnnnnnnnnnnnnnnnnnnnnnnnnnnnnnnnnnnnnnnnnnnnnnnnnnnnnnnnnnnnnnnnnnnnnnnnnnnnnnnnnnnnnnnnnnnnnnnnnnnnnnnnnnnnnnnnnnnnnnnnnnnnnnnnnnnnnnnnnnnnnnnnnnnnnnnnnnnnnnnnnnnnnnnnnnnnnnnnnnnnnnnnnnnnnnnnnnnnnnnnnnnnnnnnnnnnnnnnnnnnnnnnnnnnnnnnnnnnnnnnnnnnnnnnnnnnnnnnnnnnnnnnnnnnnnnnnnnnnnnnnnnnnnnnnnnnnnnnnnnnnnnnnnnnnnnnnnnnnnnnnnnnnnnnnnnnnnnnnnnnnnnnnnnnnnnnnnnnnnnnnnnnnnnnnnnnnnnnnnnnnnnnnnnnnnnnnnnnnnnnnnnnnnnnnnnnnnnnnnnnnnnnnnnnnnnnnnnnnnnnnnnnnnnnnnnnnnnnnnnnnnnnnnnnnnnnnnnnnnnnnnnnnnnnnnnnnnnnnnnnnnnnnnnnnnnnnnnnnnnnnnnnnnnnnnnnnnnnnnnnnnnnnnnnnnnnnnnnnnnnnnnnnnnnnnnnnnnnnnnnnnnnnnnnnnnnnnnnnnnnnnnnnnnnnnnnnnnnnnnnnnnnnnnnnnnnnnnnnnnnnnnnnnnnnnnnnnnnnnnnnnnnnnnnnnnnnnnnnnnnnnnnnnnnnnnnnnnnnnnnnnnnnnnnnnnnnnnnnnnnnnnnnnnnnnnnnnnnnnnnnnnnnnnnnnnnnnnnnnnnnnnnnnnnnnnnnnnnnnnnnnnnnnnnnnnnnnnnnnnnnnnnnnnnnnnnnnnnnnnnnnnnnnnnnnnnnnnnnnnnnnnnnnnnnnnnnnnnnnnnnnnnnnnnnnnnnnnnnnnnnnnnnnnnnnnnnnnnnnnnnnnnnnnnnnnnnnnnnnnnnnnnnnnnnnnnnnnnnnnnnnnnnnnnnnnnnnnnnnnnnnnnnnnnnnnnnnnnnnnnnnnnnnnnnnnnnnnnnnnnnnnnnnnnnnnnnnnnnnnnnnnnnnnnnnnnnnnnnnnnnnnnnnnnnnnnnnnnnnnnnnnnnnnnnnnnnnnnnnnnnnnnnnnnnnnnnnnnnnnnnnnnnnnnnnnnnnnnnnnnnnnnnnnnnnnnnnnnnnnnnnnnnnnnnnnnnnnnnnnnnnnnnnnnnnnnnnnnnnnnnnnnnnnnnnnnnnnnnnnnnnnnnnnnnnnnnnnnnnnnnnnnnnnnnnnnnnnnnnnnnnnnnnnnnnnnnnnnnnnnnnnnnnnnnnnnnnnnnnnnnnnnnnnnnnnnnnnnnnnnnnnnnnnnnnnnnnnnnnnnnnnnnnnnnnnnnnnnnnnnnnnnnnnnnnnnnnnnnnnnnnnnnnnnnnnnnnnnnnnnnnnnnnnnnnnnnnnnnnnnnnnnnnnnnnnnnnnnnnnnnnnnnnnnnnnnnnnnnnnnnnnnnnnnnnnnnnnnnnnnnnnnnnnnnnnnnnnnnnnnnnnnnnnnnnnnnnnnnnnnnnnnnnnnnnnnnnnnnnnnnnnnnnnnnnnnnnnnnnnnnnnnnnnnnnnnnnnnnnnnnnnnnnnnnnnnnnnnnnnnnnnnnnnnnnnnnnnnnnnnnnnnnnnnnnnnnnnnnnnnnnnnnnnnnnnnnnnnnnnnnnnnnnnnnnnnnnnnnnnnnnnnnnnnnnnnnnnnnnnnnnnnnnnnnnnnnnnnnnnnnnnnnnnnnnnnnnnnnnnnnnnnnnnnnnnnnnnnnnnnnnnnnnnnnnnnnnnnnnnnnnnnnnnnnnnnnnnnnnnnnnnnnnnnnnnnnnnnnnnnnnnnnnnnnnnnnnnnnnnnnnnnnnnnnnnnnnnnnnnnnnnnnnnnnnnnnnnnnnnnnnnnnnnnnnnnnnnnnnnnnnnnnnnnnnnnnnnnnnnnnnnnnnnnnnnnnnnnnnnnnnnnnnnnnnnnnnnnnnnnnnnnnnnnnnnnnnnnnnnnnnnnnnnnnnnnnnnnnnnnnnnnnnnnnnnnnnnnnnnnnnnnnnnnnnnnnnnnnnnnnnnnnnnnnnnnnnnnnnnnnnnnnnnnnnnnnnnnnnnnnnnnnnnnnnnnnnnnnnnnnnnnnnnnnnnnnnnnnnnnnnnnnnnnnnnnnnnnnnnnnnnnnnnnnnnnnnnnnnnnnnnnnnnnnnnnnnnnnnnnnnnnnnnnnnnnnnnnnnnnnnnnnnnnnnnnnnnnnnnnnnnnnnnnnnnnnnnnnnnnnnnnnnnnnnnnnnnnnnnnnnnnnnnnnnnnnnnnnnnnnnnnnnnnnnnnnnnnnnnnnnnnnnnnnnnnnnnnnnnnnnnnnnnnnnnnnnnnnnnnnnnnnnnnnnnnnnnnnnnnnnnnnnnnnnnnnnnnnnnnnnnnnnnnnnnnnnnnnnnnnnnnnnnnnnnnnnnnnnnnnnnnnnnnnnnnnnnnnnnnnnnnnnnnnnnnnnnnnnnnnnnnnnnnnnnnnnnnnnnnnnnnnnnnnnnnnnnnnnnnnnnnnnnnnnnnnnnnnnnnnnnnnnnnnnnnnnnnnnnnnnnnnnnnnnnnnnnnnnnnnnnnnnnnnnnnnnnnnnnnnnnnnnnnnnnnnnnnnnnnnnnnnnnnnnnnnnnnnnnnnnnnnnnnnnnnnnnnnnnnnnnnnnnnnnnnnnnnnnnnnnnnnnnnnnnnnnnnnnnnnnnnnnnnnnnnnnnnnnnnnnnnnnnnnnnnnnnnnnnnnnnnnnnnnnnnnnnnnnnnnnnnnnnnnnnnnnnnnnnnnnnnnnnnnnnnnnnnnnnnnnnnnnnnnnnnnnnnnnnnnnnnnnnnnnnnnnnnnnnnnnnnnnnnnnnnnnnnnnnnnnnnnnnnnnnnnnnnnnnnnnnnnnnnnnnnnnnnnnnnnnnnnnnnnnnnnnnnnnnnnnnnnnnnnnnnnnnnnnnnnnnnnnnnnnnnnnnnnnnnnnnnnnnnnnnnnnnnnnnnnnnnnnnnnnnnnnnnnnnnnnnnnnnnnnnnnnnnnnnnnnnnnnnnnnnnnnnnnnnnnnnnnnnnnnnnnnnnnnnnnnnnnnnnnnnnnnnnnnnnnnnnnnnnnnnnnnnnnnnnnnnnnnnnnnnnnnnnnnnnnnnnnnnnnnnnnnnnnnnnnnnnnnnnnnnnnnnnnnnnnnnnnnnnnnnnnnnnnnnnnnnnnnnnnnnnnnnnnnnnnnnnnnnnnnnnnnnnnnnnnnnnnnnnnnnnnnnnnnnnnnnnnnnnnnnnnnnnnnnnnnnnnnnnnnnnnnnnnnnnnnnnnnnnnnnnnnnnnnnnnnnnnnnnnnnnnnnnnnnnnnnnnnnnnnnnnnnnnnnnnnnnnnnnnnnnnnnnnnnnnnnnnnnnnnnnnnnnnnnnnnnnnnnnnnnnnnnnnnnnnnnnnnnnnnnnnnnnnnnnnnnnnnnnnnnnnnnnnnnnnnnnnnnnnnnnnnnnnnnnnnnnnnnnnnnnnnnnnnnnnnnnnnnnnnnnnnnnnnnnnnnnnnnnnnnnnnnnnnnnnnnnnnnnnnnnnnnnnnnnnnnnnnnnnnnnnnnnnnnnnnnnnnnnnnnnnnnnnnnnnnnnnnnnnnnnnnnnnnnnnnnnnnnnnnnnnnnnnnnnnnnnnnnnnnnnnnnnnnnnnnnnnnnnnnnnnnnnnnnnnnnnnnnnnnnnnnnnnnnnnnnnnnnnnnnnnnnnnnnnnnnnnnnnnnnnnnnnnnnnnnnnnnnnnnnnnnnnnnnnnnnnnnnnnnnnnnnnnnnnnnnnnnnnnnnnnnnnnnnnnnnnnnnnnnnnnnnnnnnnnnnnnnnnnnnnnnnnnnnnnnnnnnnnnnnnnnnnnnnnnnnnnnnnnnnnnnnnnnnnnnnnnnnnnnnnnnnnnnnnnnnnnnnnnnnnnnnnnnnnnnnnnnnnnnnnnnnnnnnnnnnnnnnnnnnnnnnnnnnnnnnnnnnnnnnnnnnnnnnnnnnnnnnnnnnnnnnnnnnnnnnnnnnnnnnnnnnnnnnnnnnnnnnnnnnnnnnnnnnnnnnnnnnnnnnnnnnnnnnnnnnnnnnnnnnnnnnnnnnnnnnnnnnnnnnnnnnnnnnnnnnnnnnnnnnnnnnnnnnnnnnnnnnnnnnnnnnnnnnnnnnnnnnnnnnnnnnnnnnnnnnnnnnnnnnnnnnnnnnnnnnnnnnnnnnnnnnnnnnnnnnnnnnnnnnnnnnnnnnnnnnnnnnnnnnnnnnnnnnnnnnnnnnnnnnnnnnnnnnnnnnnnnnnnnnnnnnnnnnnnnnnnnnnnnnnnnnnnnnnnnnnnnnnnnnnnnnnnnnnnnnnnnnnnnnnnnnnnnnnnnnnnnnnnnnnnnnnnnnnnnnnnnnnnnnnnnnnnnnnnnnnnnnnnnnnnnnnnnnnnnnnnnnnnnnnnnnnnnnnnnnnnnnnnnnnnnnnnnnnnnnnnnnnnnnnnnnnnnnnnnnnnnnnnnnnnnnnnnnnnnnnnnnnnnnnnnnnnnnnnnnnnnnnnnnnnnnnnnnnnnnnnnnnnnnnnnnnnnnnnnnnnnnnnnnnnnnnnnnnnnnnnnnnnnnnnnnnnnnnnnnnnnnnnnnnnnnnnnnnnnnnnnnnnnnnnnnnnnnnnnnnnnnnnnnnnnnnnnnnnnnnnnnnnnnnnnnnnnnnnnnnnnnnnnnnnnnnnnnnnnnnnnnnnnnnnnnnnnnnnnnnnnnnnnnnnnnnnnnnnnnnnnnnnnnnnnnnnnnnnnnnnnnnnnnnnnnnnnnnnnnnnnnnnnnnnnnnnnnnnnnnnnnnnnnnnnnnnnnnnnnnnnnnnnnnnnnnnnnnnnnnnnnnnnnnnnnnnnnnnnnnnnnnnnnnnnnnnnnnnnnnnnnnnnnnnnnnnnnnnnnnnnnnnnnnnnnnnnnnnnnnnnnnnnnnnnnnnnnnnnnnnnnnnnnnnnnnnnnnnnnnnnnnnnnnnnnnnnnnnnnnnnnnnnnnnnnnnnnnnnnnnnnnnnnnnnnnnnnnnnnnnnnnnnnnnnnnnnnnnnnnnnnnnnnnnnnnnnnnnnnnnnnnnnnnnnnnnnnnnnnnnnnnnnnnnnnnnnnnnnnnnnnnnnnnnnnnnnnnnnnnnnnnnnnnnnnnnnnnnnnnnnnnnnnnnnnnnnnnnnnnnnnnnnnnnnnnnnnnnnnnnnnnnnnnnnnnnnnnnnnnnnnnnnnnnnnnnnnnnnnnnnnnnnnnnnnnnnnnnnnnnnnnnnnnnnnnnnnnnnnnnnnnnnnnnnnnnnnnnnnnnnnnnnnnnnnnnnnnnnnnnnnnnnnnnnnnnnnnnnnnnnnnnnnnnnnnnnnnnnnnnnnnnnnnnnnnnnnnnnnnnnnnnnnnnnnnnnnnnnnnnnnnnnnnnnnnnnnnnnnnnnnnnnnnnnnnnnnnnnnnnnnnnnnnnnnnnnnnnnnnnnnnnnnnnnnnnnnnnnnnnnnnnnnnnnnnnnnnnnnnnnnnnnnnnnnnnnnnnnnnnnnnnnnnnnnnnnnnnnnnnnnnnnnnnnnnnnnnnnnnnnnnnnnnnnnnnnnnnnnnnnnnnnnnnnnnnnnnnnnnnnnnnnnnnnnnnnnnnnnnnnnnnnnnnnnnnnnnnnnnnnnnnnnnnnnnnnnnnnnnnnnnnnnnnnnnnnnnnnnnnnnnnnnnnnnnnnnnnnnnnnnnnnnnnnnnnnnnnnnnnnnnnnnnnnnnnnnnnnnnnnnnnnnnnnnnnnnnnnnnnnnnnnnnnnnnnnnnnnnnnnnnnnnnnnnnnnnnnnnnnnnnnnnnnnnnnnnnnnnnnnnnnnnnnnnnnnnnnnnnnnnnnnnnnnnnnnnnnnnnnnnnnnnnnnnnnnnnnnnnnnnnnnnnnnnnnnnnnnnnnnnnnnnnnnnnnnnnnnnnnnnnnnnnnnnnnnnnnnnnnnnnnnnnnnnnnnnnnnnnnnnnnnnnnnnnnnnnnnnnnnnnnnnnnnnnnnnnnnnnnnnnnnnnnnnnnnnnnnnnnnnnnnnnnnnnnnnnnnnnnnnnnnnnnnnnnnnnnnnnnnnnnnnnnnnnnnnnnnnnnnnnnnnnnnnnnnnnnnnnnnnnnnnnnnnnnnnnnnnnnnnnnnnnnnnnnnnnnnnnnnnnnnnnnnnnnnnnnnnnnnnnnnnnnnnnnnnnnnnnnnnnnnnnnnnnnnnnnnnnnnnnnnnnnnnnnnnnnnnnnnnnnnnnnnnnnnnnnnnnnnnnnnnnnnnnnnnnnnnnnnnnnnnnnnnnnnnnnnnnnnnnnnnnnnnnnnnnnnnnnnnnnnnnnnnnnnnnnnnnnnnnnnnnnnnnnnnnnnnnnnnnnnnnnnnnnnnnnnnnnnnnnnnnnnnnnnnnnnnnnnnnnnnnnnnnnnnnnnnnnnnnnnnnnnnnnnnnnnnnnnnnnnnnnnnnnnnnnnnnnnnnnnnnnnnnnnnnnnnnnnnnnnnnnnnnnnnnnnnnnnnnnnnnnnnnnnnnnnnnnnnnnnnnnnnnnnnnnnnnnnnnnnnnnnnnnnnnnnnnnnnnnnnnnnnnnnnnnnnnnnnnnnnnnnnnnnnnnnnnnnnnnnnnnnnnnnnnnnnnnnnnnnnnnnnnnnnnnnnnnnnnnnnnnnnnnnnnnnnnnnnnnnnnnnnnnnnnnnnnnnnnnnnnnnnnnnnnnnnnnnnnnnnnnnnnnnnnnnnnnnnnnnnnnnnnnnnnnnnnnnnnnnnnnnnnnnnnnnnnnnnnnnnnnnnnnnnnnnnnnnnnnnnnnnnnnnnnnnnnnnnnnnnnnnnnnnnnnnnnnnnnnnnnnnnnnnnnnnnnnnnnnnnnnnnnnnnnnnnnnnnnnnnnnnnnnnnnnnnnnnnnnnnnnnnnnnnnnnnnnnnnnnnnnnnnnnnnnnnnnnnnnnnnnnnnnnnnnnnnnnnnnnnnnnnnnnnnnnnnnnnnnnnnnnnnnnnnnnnnnnnnnnnnnnnnnnnnnnnnnnnnnnnnnnnnnnnnnnnnnnnnnnnnnnnnnnnnnnnnnnnnnnnnnnnnnnnnnnnnnnnnnnnnnnnnnnnnnnnnnnnnnnnnnnnnnnnnnnnnnnnnnnnnnnnnnnnnnnnnnnnnnnnnnnnnnnnnnnnnnnnnnnnnnnnnnnnnnnnnnnnnnnnnnnnnnnnnnnnnnnnnnnnnnnnnnnnnnnnnnnnnnnnnnnnnnnnnnnnnnnnnnnnnnnnnnnnnnnnnnnnnnnnnnnnnnnnnnnnnnnnnnnnnnnnnnnnnnnnnnnnnnnnnnnnnnnnnnnnnnnnnnnnnnnnnnnnnnnnnnnnnnnnnnnnnnnnnnnnnnnnnnnnnnnnnnnnnnnnnnnnnnnnnnnnnnnnnnnnnnnnnnnnnnnnnnnnnnnnnnnnnnnnnnnnnnnnnnnnnnnnnnnnnnnnnnnnnnnnnnnnnnnnnnnnnnnnnnnnnnnnnnnnnnnnnnnnnnnnnnnnnnnnnnnnnnnnnnnnnnnnnnnnnnnnnnnnnnnnnnnnnnnnnnnnnnnnnnnnnnnnnnnnnnnnnnnnnnnnnnnnnnnnnnnnnnnnnnnnnnnnnnnnnnnnnnnnnnnnnnnnnnnnnnnnnnnnnnnnnnnnnnnnnnnnnnnnnnnnnnnnnnnnnnnnnnnnnnnnnnnnnnnnnnnnnnnnnnnnnnnnnnnnnnnnnnnnnnnnnnnnnnnnnnnnnnnnnnnnnnnnnnnnnnnnnnnnnnnnnnnnnnnnnnnnnnnnnnnnnnnnnnnnnnnnnnnnnnnnnnnnnnnnnnnnnnnnnnnnnnnnnnnnnnnnnnnnnnnnnnnnnnnnnnnnnnnnnnnnnnnnnnnnnnnnnnnnnnnnnnnnnnnnnnnnnnnnnnnnnnnnnnnnnnnnnnnnnnnnnnnnnnnnnnnnnnnnnnnnnnnnnnnnnnnnnnnnnnnnnnnnnnnnnnnnnnnnnnnnnnnnnnnnnnnnnnnnnnnnnnnnnnnnnnnnnnnnnnnnnnnnnnnnnnnnnnnnnnnnnnnnnnnnnnnnnnnnnnnnnnnnnnnnnnnnnnnnnnnnnnnnnnnnnnnnnnnnnnnnnnnnnnnnnnnnnnnnnnnnnnnnnnnnnnnnnnnnnnnnnnnnnnnnnnnnnnnnnnnnnnnnnnnnnnnnnnnnnnnnnnnnnnnnnnnnnnnnnnnnnnngaattccccacttcaaccccagaaaggtttaatgcattctgtctttatataatttcaaattttatttacatgaaagcatacaatatttattatttagtatctgccttctttcctctagtatatgacaaaaattcacttttttttttttttgtacaaaggaatgacaatccttcaattgtaaaaactaaacatgccacccaactaatcacatgccttagggcatatttctgaaaaataagatacatattttaaaagcaactttattaaaactcagggctattaaagtatatatacaaatacaacactaaaaaataaagttacgtttccagtccgggctcagtggctgatgcctgtaatcccagcactttttgaggccgaggcaggcggatcacgagttcaggagattgagaccatcctggctaacacggtgaaaccccgtctctactaaaaatacaaaaaattacctgggcttggtagcctgtgcctgcagtcccagttactcgggaggctgacgcaggagaatggcgtgaacccgggattcggagcttgcagtgagctgagaccatgccactgcattccagcctgggcgacagagcgagactccgtctcaaaaaaaaaaaagcttctgcaaagcagaggaagcaatcagtagaatgaaaaaacaggccgggcgcggtggctcacgcctgtacacccagcactttgggaggctgaggcgcgccgatcatgaggccaggagatcaagaccaccctggctaacatggtgaaaccccatctctactaaaaatacaaaaaaagtgtccaggcgtggtggcaggcgcctgtagtcccagctactcgggaggccgaggcaggaaaatggcgtgaacccgggaggcagagcttgcagtgagcggagatcgtgccactgcacaccaacctgggtgacagaccgagactctgtctaaaaaaaaataaattaaattaaaatttaataaaaatgaaacaacccagataatggaagcaagtatttgcaaaccatgcatcaggcaaggggttcatacacaaaatatataaagaactcaaactactcaaaagcaaacatacaaatgatcttattaaagaaatataccccaaacctttgtcccccaccattatttccctaccttcttttcccggcggcctttggccccctccctctcaccactctttttctttcaccatctgcccccaaacttcttcatcattttttgcccaccctcatttcacaaagctgcctctactctcctgctcaacacccttttccccatgcatctacccaaaccctttccccagtttcttcccactgtcttttccccttatccctggccagcctctttttccccaacccgctctcatccatctcttttgctctctcaaccatctcttttgctcctttatctaagcaaaaacattttcccccgtcttttcccaaaaccttctctccactcctgctgctcactaccctctttccccgcttcatccaaccaaaaactgttttcttcatcgtctttccccccgttcctccttgccattctctttcccttctccatctacccaaaaacatttcccccgtcttttcacaaagccttctccccacgcctattcacctctctctttccccctccatctacacaccaaaactttccccaccaccttttcaaagtctcccccctttaccactagtgctgttttttctcctaccctgcttgccaccctcttttttcccctccatctaccccaaactatttttctgttgttttcccaaccgccatccctgctacctctcgccaccctctttcctccctccatctatcgaaacacttttcacccaccgtcttttctttcttcactgtctttcttttctgccactgtcttttcacaaaaccttgtcttcctcctgctggctaccctctttttccttctcccacttgctaccctcttttgctcaacccaaaaacttttctcccccactgcattttctccacactgtcttttcacaaaaccttctctccctactgctccacccgttttcccccatcacctccctctctttcctccgcccacttgccaccctcttttccccctccatgtacccttaaactttttacccaccgtctttctgcaaaaccttccttccctcccactccccaccctgttattacacctccatctacgcaaaaacctttttccccaccatcttttcaccaccatcttttttcaattccttctctggctaagctatccttttttccctttggccctaactaccctctttgctcccctctatctatcccaaaactgttttccttctcctacctctccagccgcgatgctatctctccgtcactgccaacaactgcaatgaggcgagccgcgctcccgcggctccagcctccagcatatagccaccgaatcctgattcctagtcctctacgttgggcaatgagcaactcgacatgaagatacaggaacctgaaaaaaagtgatcgcacttcagcatcatttatgtactgcggtagtgcccatggaggttcctggactgcatgtcttgattggatgagaaaaaaacctccaggcttactctgattggactttatgatcatgttctgattggatgagagcaagtcttaacacaaccaatcacagcatgaaaataaagtccaatcagagtaggcctagaggtttttttctcatccaatcaagacatgcagtccaggaactgcatttgcataacctcatatataaaggatgctgaggtggcgtcaggtcatttcagactcttctgtgtcgagtggaggagcaactctgtgcccagcttagaggactggaagaggccgcaatcttccgcctgctggagggtggaggatggatggagcctggaacctgggtcactacctcgctgcagttggtggtggcgatagagcagtaggagagcattcggcagcaggagcttctcctgctgggctggaggactagaaggaagaggcactgccacatgctggaggctggaacctgtgccaccatggctcgcctcgctgtggttggtggtgacatcggagactgcagctcagccacagtggtagaaatgtgatggtgtaggtgagtttttccgggcctgccctgtatgcctctggggtcaagggttgggtgtcctattggggttcactgctagaggctaccatgcctgtggcagtggtctggttggggacactctccggggttgcattgctggtggtggggcaggttgcctggctatctggggctatactgcctgtggtggcaggggtggtggggggaggcagattgtgtacaatagcttgtattgctggtggctggggaaggattaggggcgctattttctgctgcactgcccgcagcagggagtgggttgagtggagttatccagggctacaatgctggcgggggggtggtttaggggcgttgttgggtgctacactgtgactggaggggtgcaccattaggagctgaactgcctgtggctgggtcagattgtgggcactattgggtggtatgctccctgaggtgtggggggagtgtttttgtcagggggtattggggttacattgcctgaaactgtagggtgtgttggatgtgttatccaggagctacactgctagtggcagggggcagattaggggtgccatgggggctacactgccagtggcattggcgagctggtgaggtggcagcagcagtgacagcagtggcttccttcttctcgtagcttccaagtaaggtatcgttttcttcttctcagactccagactctagaaggcgattttcttctgctcgagctggattgcatggtagggcctccacacccactgtggtttcccagcctgccctcatgctttgtgttgcgaagatcacgtgggactaccgggcagggagtagtaggcaccatgggggaagtgggaaacagggcactgttggtggaggtgtcaggaatgggaaccagccctttggtggggagggctggctgggtcttagtttctcctacgcaggctcccggaggaggacagccttggtgggcccagcaattcctggccaggtgtacttggccaagggcctgtttcagtgaaggcactcactcccaccccaggccccagttcctggccagcttttgccagaaggagaggttggactttggaaggtgggtgtgagtgccttcaatgaaactgatccctgacacccagtcaccagcctaacgaggtgaggctctaatggttccaatccctgagtcctgttttgggcttttctggctttgcctgcccagctgctccaagccactctgaagaaggagaaggaggagtcgcctgtggtatggttgagcagatgccgtggctctgcagcttgcctcatgcagttggtggtggagatggagaccatagctagaatggagcggtaggagggcacccacgggggcttggtggtaggagcctggtagagtgggctggtacattgagggtgactggttgtattggcattggtgctagtggtggtagcagtaggaagtctgggggccgggaagggggagtaggagcactgcagggcccatcccgttctggggtggggaggaacctgtgggtgctgtaacgaaggtctcggtggcagtggtggtggtacacctagggcaaagaggagtcctcccccttctcctgcaatctctggagtgtgccctcctcctgccggtgtctgagctaggcatgagtggcagcattaactcattcttaacaaaatttagtgactatttgtgtatccttttgcttgttttttgttgtgatactcttggagttactcaaattttatgaatcgaggaggggataaaaagtattatatgataggccttctaattcccacacctgttctttttcctttcttccattgtgttttcttctcattttcttgttcctcttcattttcttttgctactgcttctatttcatgtttctattcttgtttctcctcctgtttttgtattcttatgccaagcaatggccttaaccaccaaaactgagttaaaaataaaatacttgtcactgttgtgttttttaaataactgatcccttactatgttttagagatgaggaaaaaaaatgagttgtataattagttacttgaatagttatgctttcataattgtgttaacccatttatgcctagtgttccatgctaagcatgtggaaattacttatatcctactgttaaatgtcatcgaaaaggtctgatttttcacttatgcaaaaattcaaaaaattgcaacctctggcataaatggactaatgtgttgtgttattcaaggaatcaaaaaatgaagcatcacataaaatattggtagcaaacagccatttcacctctctcacacttttttctggagctatgcaagagtcacaggggtaataagttctaatttatgagatgattaagtgaaccatattcccttaattttttttctgccaccattttcaagagtattatcatctgcatgaacaaagggttcatcaacacatctttgcaagaggaaaaagaagaggggagaatcatgtgtataatgttgtaaggcaaacattcacaaccaaaaacaaggttttattaactttcacctttaagaacctgcagtgtttagccctctttgattcctagtattattacctttggtatgaactcttttattaaactgatcactctagaagtttatgcattttttatcatttttcaagccaacagaaatgtgtaatgcctataattctgacacttcagttatttttaaggctatgagcatgtaagatactgttggtatatggaagaatatgtataaataccactaggtagcttattttgaagagttagtatttaagtttttgtccagagtagattggttgcagtttcttaggtgtgtttcttaatatgttgcctcaaagttttaaagcatgtagaaatttgaatacagtttaacttcatatagtcctttgttgatagatttaatatttctaaaaactaaagacatcacagctccctttaagattcagtaatattaataaaattttagaaatatagggttagaatccaacaaattcagaggaaaattgttaaattatatagctgtagagcaagaatgaaacccaggttctaagctctaagggggccatgaggtaccgtacaagtacttcagtgactgggcatagattcagcaaaattacaggatggttaagagagtgagctgtggagcccaactctatgtaacatgaatttttaaactgcatggtgcctcagtttatccatctttacagtggggactgcagtaagtttttctttttctgctcagttgtctgtcatgttgcgactgttccctagtctgtcttgttgccactcagtgcccacatgacaagacctaaggtaatttctgacagcctgggactccttaaagaaaaacagaaggtgctacaaaacccattttaggagaaacctctgttgtcctcatggaaccccaagaacttcaggcagacgggtctctctcaaaatctaaagctctcctctgttttgctttgtgttatctgaccttttaggtttgggtgggcatcagaaatcagtcagggagagagatctaaagaaagttgtggatatgaagatgtatttatggtaagaaaagttgtgaaggaaagaaatgttatatgagaggatcttgtatggcaaatttttgtcctaaagtagaatgactaattatgaaagagggaagtacaggaaaagtcagaaagttcatgtcatagatagtctgtggaagttgtgttagggttcataaaatgagaaagaaaaacttaacaactgctagatcttttcctgtctagaagtgttgtgtatatgatggatatataaaggagccctaactacttggcttagaagaaaaggaagtctcttaaatattttgtcagaaaaatagaatctctaatgccttttatttaacatgacttcagtgatctttgggaaataaagacagtgttaaaatcattttttagtagagacagcatttctccgtattggtcaggctaatctcgaactcctgtcctcaggtgatcctcccgccttggcctcccagagtgctgggattacaagcatgagccactgcacctggcctacaaataggttaaattattttataaattagctgttgtttgttttgcctactttcagacttctggattttttttaagtatgaaggatttcaattgttatattaatataaatgcttagataaatagcacaaacatgaatttttttttgacagagtctcactctgttgcccaggctggagtgcagtggcagaatctcagctcactgcaacctccacttcccaggttcaagcaattctcgtgctcagcctcccaagtagctgggattacaggcatatgccaccatgcctggataatttttgtatttttagagacggagtttcgtcatgttgtccaggctgatctcgagctcctggcctcaagtgatctgcccgccttggtctcccaaagtgttggaattacaggtgtgagccatcacacttggccaactgtattctttatgaatttttttacatcaaaaagctcatttgtaatattttctgtatgtatacatgctataaaatttattttgttttattttaactttttaaaaatagagatggggtctgattgttttgcccagcctggtcttgaattctgggctcaagtaatcctcccaccatgacctcccaaagtgctgggattacaggcatgagccaccatgcccagcctgtaaaatttattgtaaaggaaaaggcatattttcattaagctgataatctttacataaatactgaagcatggcatatttctttattctacttgggctattttgtgttgcattaagaagaattttttatttgttttttcttcttactatgcttgtttctggaatactcctttcctcccttatcttccaaactctactacatctaaatttatcctatttttcaagggtttgatcacatattacgtcatccaggaagtgtctctcctattccctcttctccaaaatgtatattttctttttctggaaactcttgatcctttgcctctagaccataagccctttgtaggcatgtctgtatctgagtttttaaatttttttttcctcttttctcactcccagaataacaccctgtgccaaggagtagtagatacttgttgaatgcataaaagagcttagcagctagagttagtgtggatgctgtagaagatgtctgatacacatatggcagtttgatgctgaatagtttttggaaattaaaaaacaggtagaaatttcaccaacgtcagtgactaacatagctgtaattagtaaattatcaaaatgtttctttttttttcttttttacagagagggtctctctctgttgcccgggctggagtgtggcggtgtgatcatggttcagtgcagcctccgagtcctgggctcacacggtcctcctgagtagctgggactacaggtgtgtgccaccacacatggtcaatttcttttattttgtagaaacagagtctcattatgttacccaggctgacctcagattgctgggctcaagagatcctcccaccttggcctcctgaagtgctgggattataggtgtgggccactgagcccagttaaaagcatttctttaaaaaagaaaaaaaagttctgtttattgggatttgggggaggaagagaaagtaaatatgggattggttcatcctagacagcactcatagttctagataatattagaaagcaataatgttttaatttatatatgcagggaatttcggagtaatttcaatcctaggaaaaaactgggagttagaaatatgggacgattggccggcatggtggctcacgcctgtaatcccagcactttgggaggcccaggcaggcagatcatgaggtcaagagatcaagaccattctggccaacatggtgaaaccccgtctctactaaaaatacaaaaaaaaaaaaaaaaaaaaaaaaaaactagctgtgcatggtggcacgtgcctgtagtcccagctactcaggaggctgaggcaggagaatcgcttaaatccgggaggcagaggttgcagtgaaccgagattgtgccactgcactccagcctggtgacagagcgagactccatctcaaaaaaaaaaaagaaatatggaacagttggttgattataatagaatttaggactccctttgaaagaataatatcaactagttttatattaaaaaaattaaattcttaagtagattcgtcaggagtaaaggaaaagtcaagattcccaacttatttggatttctttcccccattacagtgtactcgaggaacaaaatttgggctgtttggctgtcttttttatttgttatacataaataaactgataatcaaaaccaaatatattgaggttacatttttcttttctttctttctttttttttttttttcctgagacggagtctcgctctcacccaggctggagtgcagttacatggtcttgacttactgcaagctccacctcccaggttcacgccattctcctgcctcagcctccagagtagctgggactacaggtgcccaccaccatgcccgactaattttttctatttttagtagagacagggtttcaccatgttagccaggatgatctcgatctcctgacctcgtgatctgcctgcctcggcctgccaaagtgctgggattacaggagtgagccacagcacctggcaaaggttacatttttctagcaaaatttgattcagatttatgatgagagtcacctttatgcttatagattgcccctttaccccatacttggttgaactgacagacattcttcttgccattatcactgtcatacactgttcacattcagagtaatttgttttaggcaattcatttcccttggcaataacatggagattaatgtaattttgaaaatgtttaagtagtcatcatcaggactttgagtttctgttcaaagatgtttaactttgcattacttttaatatttttaaattcatttttaactacaataacttttatgtatttggaggtatttggaatgaaatcaaaacgtgctatctaggagttataacctaaaatatgcagaacattaatatacctgatgtaggagtatatacattctgttgaggggggagaaagaagttactttatattcacacaaaatcattttaatgcatgaaggaggatatgctattttaaaatttgatctttcactaattgtaagtaatacattattttttatatatactgaaattcctggatgtaatctactgagtttgctgcatattcttccagtttttttttctgtgtttgtataattttctaaattatgggatcataatatactattcttttatatactactgttgcaagtttgtctatttatttcagagttacctctatcaatcattaacagcaacttaaataccccatttctagtacatgaaaataccataatttgccagtcacgatgactcacacctgttgtcccagtactttgggaggccgagctggctggatcaccggaggtcaggagttcaagaccagcctggccaacatggtgaaaccccatctctactaaaaatacaaaaaatagccaggcatggtggcatgtgcctgtaatcccagctacttgggaggctgaggcaggagaatcacttgaaactgggaggtggaggttgcagtgagccatgccactggactccagcctgggcgacagagtgagactctgtttcaaacaaacaaaaaaagaaaataccataatttgcttaatcaacttatggtcactggatttttttgttgttgccagaaaaagaaagctgtaaacaattgtgtgtgtgtatgactatttatgcacatgtacatatgtatatgtattttgtgtactttatacaaacagctttgtaggatagattcctagaagtggagttgctgaaatcaaaagatgtgaataatgtagatatggatagatatttatacattttccttccaaaaggttgttgtaccaatttgtaaagctaccaatagtattcacatatgccccataccctggctaatactagatattacagtttaaaatattttgacaatttaggaactgaaaaaatgtgatggccttttgtcaatcactattgaggctgaacattttttaatatggagaaagttgtatttctttcttttttttttttttttttttttttttgagatggagtgttgctcttgttgcctgggctcccaaagtgctgggattacagacctgagtcaccgcacctggcctttttttttttttcttagacagagacttgcttttgttgcccaggctggagtgcagtggcacgatctcggctcactgcaacctccgcctcccatgttcaagcaattctcctgcctcagcctcccaagtagctgggattacaggcatctgccaccacgcccagctaatttatgtatttagtagagatgggatttcaccatgttagtcaggctggtcttgtactcctgacctcaggtgatccacccacctcagcctcccgaagtgctgggattacagggtgcgtcactgcgcctggccatatgtcttttataaattgcctacttttgttctttgtttattttctgttggggttactggtttttcacaggttaaaagttctctacatattcacttttttatttctttctttttcttttcttttttttttctttcttttttttttttttttctgagacagagttttgctcttgttgcccaggctggagtgcaatggtgtgatttcagctcacctcaacctctgcctcctgggttcaagtgattctcctgcctcagcctcctgagtagctgggattacaggcctgcgccaccatgctcggctaattttgtatttttactagacatggggtttctccatgttggtcaggctggtctgaaactcctgacttcaggtgatccgcccacctgggcctcccaaagtgttgggattacaggtgtgagccaatgcgtctggccttattcacttttttcgtacgtgtgcacatatccccctagctattcttttgtaatgttatgcaatcagataaatccaaacccagcactgtgctgctgtgggaccttgggcacattatttaacctctgtacaccttaatttccttatttgtacaatggagataatgtaaatagcattaggcataatggctggcacaaagtaagtaaataataaatgttagttgtgactgttattaatttatttatgtgacttttgtgttttgtgctctacttaagactttccttgctccaaaatgtaaaatattcacctagctactaaactagaaaaacaaagtgaggaacattatatgcctctatgtgtctttgctttaaagatgaaaaacaatgtatacatttttgcttgtatatcacaggatatatgatacttggaaacattggttgtcatagtaggaagaatgagtgagaggaagactttttaactgcatgtgtttttgtatttttaaaacaaagaagtccccagattgtatttaatacttcaatggtttctttattttccttttccttctctttttaaaacttctaattctttgatccgtctggaatttatttctggtataagaagtgagacatattttgggggataaaattgtgtgtgaattctaccccatctagctagttgtgtcagcaccatttagtgaataatctgttttttgcccccctattagaattgcagcttttgtcatttactaaatgtgtttgggactatttctgattggtcttgttattttggtctcttgtgtattaccatacactttaaattactatcattttataattttaatacagatggggttaattacctgttcatttctctttttttttcagactttgacaattctggtctatgtgttcttctagatgaactttagaatcattctgtgacattcaaaaagaaatcatagagatttttattgaatactgaatattgattgggaatactgaaattggaggtgaagtttggggaaattgacatctttatgtactttctgtcctgtgttctaacagatttttatgtgtctcagtagattttcaaactttgcttcaaataagtcctgtacaaataagtcttgtatatttcttgtttatttattttaaaaaacatcagacccatgaatgggagtttgtttattttatccaacaaatattatagagaatcaaacaggtagtttttattctagtgagagaagacagaatatactcaataaaatgaagtacgtaatccatttcaaattatgataaacctataaatgaaccaaaagggtgatgcgattgagagtaactagtgggagcttaccttatatgtagggtggttggaaagactcttctgagatgacatttgaactgagaccttaagtttgaggaggagctagccacctgaatgagccaggaacagcgttcctggaagagagtaaagaaggacaaaggcccagctaggaaggacctggcagagaagggctcctgaagaaactgaaaggaaactcatgttgctggggcctaatgagcaatctggaaagtaagcaggccaaatctagtagggccttgggtcatcgtaagtagtttagatatgcagtgcgtaggaaatccttggggaatctgaagcagaagagtggcgtgttctgatttaaggtttaaaaagaacacttggctttttgagttgagaaagtattgaagtgggaagcccagttaggagtttttgcagcaagaggtaaggatggtggtagttagatggagaggccagggaagcttcagagtctgtgtgtgtgtgagtgtgcgtatgtgtgtgcgtgtgtataaggaacagctaaacaacttgctgttggagtgggtgctactgagagctaagtactgctagctgctgcagaggccgtgtagagcagaacagagctgatctttgccttcacaggtgtttgacagttctgttcgtttctgaggtgtgtaccaaaataaagtaggctaagagcatttgactttaagatttgtggagctcgggggtgttgagggggatgcagcaaaaaacagagtctgttaataacccttgttttatattgcttaataacctgtagtctctgttagtgggtcaaaggagaggcagcagcagatgatctttaaggtatctgtctttgagttagaaaaacatagcttgaggaagttatgtagcttccctacagacttacagctaatagtagaaccagacttttaggtgagctcatgcacacatcaagtcttagcacactgcctagtatatgtctagagctcaataaatggtaacttttagtaatacccacttagatattgttatatctattaattcaggccaaatatctacattaaaatttttcttatctcaatttctttgttcttttgtgttaatcagggagggaattggcatgtagtcatccattttgtttgtgaaatatatttgttctttttttgtttgtttattttgagatgaaatcttgctctgtcatccagcctgtagagcaggggtgtgatttcggctcactgcaacctctgcctcccgggttcaagtgattctcatgcctcagcttcctgagtagctgggattacaggtgtgcaccaccacaccaggctaattttttgtatttttttttttttgagatggagtctcaccctgtcgcccaggctggagtgcagtggtgcaatctctgctcactgcaacctctgcctcctgggtacaagcgaatctcctgccccagcctcccaagtagctgggattacaggtgcacgccactacatacacctggttaattttcatgtttttagtagtgttggggtttcacatgttggtcaggctggtcttgaactcttgaccttgtgatcctccagcctcagcctcccaaagtgctgggatgacagatgtgagccaccatgtccagccatatttttgtatttttagtagagatttctttcaatatcgtactttattagaggtaggataggttaactaaaaagctttttccttagcttccatttgtttctctgtctttaagtaagatgtcatgatgtcaaaagaggctgcaaataaaataccttgtcagtggcattcccccaggttagatcttaaccaaaaggctgagaagcagtagcttttttccccccaaagggaagaatgcttaggttattttacaggagaaaatccattccagtatagcaccactctggtcttgtacaaattacataattcacttagataatttctagtctttcctctcctggatggtggactctgtaataagtttaggaggtcggctttctttaaattatccccaggttggaggattttaggtgtcgggatgcccagggtggttgtccttcttagccttgtcttacctaacatacttttagaattggtctagagctggacaactttgtgggaactggagtgacctaatttgcttcagtttaataactaatattttagcatttaaatgtcatagaggcattgccctatcccatacttttgtatcaggaggtttcattattttatcagttaaaaattgcatattttgtaggatcctttttctgctttggtgaaatgtaggcttcacctctattgtgatgcttggtggattcattcttgctcatctgaagtgacatctgcggtcctgccactgtgaagtatatttttagcttttttttttttttttttttgagatggagtctcgctctgttgtcaagctggagtgcagtggcacggtgccagctcactacaacctccacttcccagattcaagtgagtcccctgcctcagcctcccgagtatctgcgactacaggtgtgtgccaccatgtctggctaaattttttttgtattttagtagagatggagtttcaccatgttggccaggatggtcttgatttcctgaccttgtgatccatcagccttggcctcccaaagtgctgggataacaggcatgagccactgtgcccggccatttttagctttttttccaatgtagcttaggccaccttgaacacctttgcataacacattttggttatgcaaaggttgtgggccaaaagccaggagttcctgctgagaggaaaaattacttgttttttggcaggttagtatttgaaattttgttgcaagattttcctgttgagtaaatatgtgtgtgtttatttaatatgagaagatttaaaaaggaacttaaatagatcaatttcattttgcaatattttattacctgtttgcaatatgtaagaggctagttctgggtttatctgtataattcagttagaagtgctattgtcttttatgacagtgatgtataattattactatattattctcatcctaaaacattatatgttgatatgtaagagatgaggaagttgctcataaaatcttgatcggatttcttaaactattcatagaattgttttagttcatgagtcaaccatgtaactaccctgagttaatgagttttggtgctaagaactgaaattataatttgatactgccacttaaggtgctcccttccccttcagtctgaactttagattctttcatttcagtgggtttcaaatgtaaagtattctgccgaggtatcttagtgaaccaggactggagtgaaaggtggagggagggatggggaaaggcagggggagcctgaaaaaatgaatcctaggtctcccattctcactagatcagaatgtttctccattgtaccttttgtacatttagctttcatttaagacttctgaggaaaacattctggttaaaaaacaagatctgagcactgttgctgtgtatctcgtggacaagttttgaggaaggaggttgtggtggtctccaggctgcagttcatgtgacgacaggaagggcttgctttgacctgtaaatttgtatgccggtaggggctaatttcctgactttgctagtttttttttttttttccttctgtattgggcgaatagtacttttaaataaaactaattttttttgttttttttgagataataaagttgaacttcattaaagtcataccacaaaactaggacaacaggaaggattactgaaatgagggaaaaaatggagaagtcacttaacttgtgactttgagtgacattgtttgtaattgttgaactcaggactcaccatagctgaaagttaaacaatgtgcattaaaaaattgtacctcatgggtttctaatcatttaggccactgttagaaaaaagtgggatgaccctgggttaaaatcttttttttttttgcctctgcattccacttatagctttatttatttgggatgtctgagttgggaggagagcacagagatagatcacttaaagcatgttttaggacagcagatcagaattagttggaaaacttttacaaaatgcatgaacgttcatatagtgaaatactctgtttttggacagagtttcattcttgttgcccaggctggagtgcaatggcacgacctcagctcaccgcaacctctgcccctggtttcaagcgattctccttcctcagcctctcgagtagctgggattacaggcatgtgccaccatgcctggctaatttttgtattttcagtagagacggggtttcagcatgttggtgaggctggtctcgaactcttgacctcaggtgatccacccgcctcagcctcccaaaatgctgggattacaggcgtgagccaccacatctggcccatgtagtgaaattctctttagcaatagaaagaaccatagatgcatgagaataattgccaagatgtattttttttgggggggggggggcggagtctcgctctgtcacccaggctggaggttggtgatgtgatcttggcttactgaaagctctgccacctgggttcatgcctttctccccacctcagcgtcttgagtagctgggactacaggcgcccaccaccatgcctggctaacttttttgtatttttaatagagacggtgtttcactgtgttagccaggatgatcttgatctcctgacctcatgatccaccctcctcagcctcccaaagtgctgggattacaggcatgagccactgcaccaggccaaccgagatgtattaagtaataaaagcaagatacagaacagtgtgtttctagtatgccaccatttacataggggaaaaagtgtgattgtatgtatgtgtgggatatttctaaaggacactctagaaactagtaactttggttgccttctgggagggtaactgggtagcagctggaggagaagggcaaggagatttttcactttgtattctgtggtacttttaaaaactcttaagtcctgcatataatctttatttctaaaaagatcaaccctccccacagtgccacatgttggcttttccccttccacctggagcagttgcagatgtatagatgaggagaaagctcctcaggtggttttaatgtgtggtctcacggaacatctcaccttctcctagttcactacctgctgagaaggccgcaaagcattgcagaaaacattagtttttcccattttgccacagacaattttgtgatattggaggaattattgactttctctgatcttcacatttctcacctgtcaaatcagtgttagttgggtaatctcaaccttccaatccttaagatttgctgacctccatgcctcgggccttggaagggaacagggagaaaacagactgagggacagctggtcagtcttctgactcttctcctggtcaactttcacaacagcaggaaatgtgacatcaggagaaaggatgatatatttatttaaaatatttatatattacatggtaccacatgcagtttttaaagttcttttttttttttttttttttgagatggagtctgggcccctcacccaggctggagtgcagtgatgccatctcacctcactgcaacctccgcctcccagcttcaagtgattctcctgcctcagcctcccaagtagctgggtttacaggtgtgtgccaccatgcccggctaattttttgtatctttagtagagactgggtttcaccatgttggccaggctggccttgaactctgacctcgtgatctgcccacgttggcctcctaaagtgcgtgagccaccacgcctggccttaaagttctttctatacattttttcttttattttttgggtcagagtttcattgtatcactcaggctggagtgcagtggcacaatcacggctcactgcagtcttgacctcctgggctcaagtgatcctcctgcctcagcctcccaggtagctgggaccatgggtgtgtactgtatgcctgactaattattttttctttttcttttttttttttttttgagacagagtctcgctctgtcacccaggctggagtgcagtggtccgatctcggctcactgcaagctccgcctcctgggttcacgccattctcctgcctcagtctcccgagtagctgggactacaggtgcccaccaccacgcccggctactttttcgtatttttaatagagacagagtttcaccgtgttagccaggatggtctcgatctcgtgacctcacgatccgcccgcctcggcctccaaaagtgctgggattacaggtgtgagccaccgcacctggccgcctaactaattattattattattttaattttcttgtagagatagttctggcttcattgcccattctggtcctgaatacctggccttaggagatcctcctatcttgacttcccaaaatgctgggattacaggtgtgagccactgtggccagcctataagttttgttttaaagttagattgaatgacaattccctagaaaattttattttctaaacctaactggataaagaatatattgataaaaactgggaaattgatcaatttgtcatactgaattattttttgaatttgccctcttcccaaataccttgaaatgatggaaacaaaattaaaactttactaataaagtattaaatgggtgaagattttatatatataaaattatatctgttatatttttatgtatgcaattatatagttttcatcttatatttaaattctatttttttaaaaccacccaattaggtaataatagaactccggtcttaaagtaagagtgtatgtacacacatgcacatgtgtatatgtgtatataaaatttttgtcatgggagttttatatataattaagatagaaattatatattattgcacacatttttacacatatgtaatattctctaccatatgtatgtaaaatacacccatatgaattatgtataacataaatatttgtgttatcctgaaacataaacgtagataatcatgttttagaatgggaatactcaggagtataggggtacctgttctcccattagtcagtctgtgaattcaatatttatgttttctcatccagaatttctctgggacctgacaagctgactctcatgcttgtgtgtaagaggaaatgttctagaatagctgggaaggtggtgaaagtagcagcaacaacgaagcacagtgaggtgaaacttgccctgctggatatgaaacctcgtaatactagagtaatttgaaaagtgtggcattggcacaggaaaagacagacaaatcaaattagtctagaattgtggacaagtaggaatagagtttataatgaggatggctttctttttctttctttcttttttttttttttttgagatgaagtctcactctgtttccccagctggtgtgcaatggtgtgatctcggctcactgcaactgccacctcccaggctcaagcaattctcctgcctcagcctcccaagtagctgggattactggcgcatgtcaccatgcccggttaatttttgtatttttagtagaaaagaagtttcaccatgttggccaggctggcctcgaactcccgacctcaagtgatcttcccgcctcagcatcccagagtgctgggattacaggaggagccaccgctcctggccttttttttctttatttgctatttcagttccatagaagcaagcaaagagtaacataacaaatatccatctacctaccatctgtgattacaaaacttagtattttatcatccttgcttcacaattatttaataaagacaatacttcctctgcacaaatgcttaccttaaaactactcttgaattcttttcacaattgacttatcaactcccaaatttaaaaccatgtatttttgtctttatatgccttagacatttatagaaaggtatttactgagcagttactatgtgccagatattatgctgtttttatatactgtttttactttatatagctaattatattatttgtcacatactaacctattttaaatataaaaagaaatgatgcattaatgttttcaaaccttggtaacttttattaagtaaatacctgagaggaagcttttcctggtaattgtggttttatttatgtatctatagttataatttattagaagtacacttggtgttttagttcttattaattctatttttttcccatcctgtttagatggtttcctagaaacatgattgtttattggcgttgatctcgcagtctggtgagaacttctttactgataatgtcaagttcagtttatcctcccaaccaaggagcattcagcacagaacaaagtcgttctcctcctcactctgtaaagtatacgtttcccagcacccaccaccagcaggtaaggaacaaatgctatgcaaattgcacgtttttttgtttttctttacttttcctatttaatacacatgttggtagaaaccaccaaatttgcctttttttttaagtggcaagagctatttacaaagacaaggaaccaaaggttgggaattaattatttctgtcttcttactgtggctttatgccgatttcaggagttgaacttgtctttgttttgatgacaggagttgatgataaatagaaaacttatcaattctctagaatttctagggtaagacctatatttatactcccaagttgtggttgagttttaagctggctagataacttggcatgtcttgagtgatggccaggataaagacctctgtcttcttgagagattgatggtaggaagatttgcatagtaggtaggaaggaaggaagggatggtagataggaaggaagactttattataggaagagtttgtaagagattgatttaccttgtgaaaaataaagtatgaggtgaaataatcatctcagagtagaccaaagatatggatgtaagaggtttaaagaaaaataggaaaggatgggataaaacggtcatctcagagactaagaaagcagatttgtcatcaaaatgtactacggggtcctactgaggactcctttgaagtgtagtcatgattacagagttagaatggacattcctacgatgttcctgtgtagggaggcatttagtcttttaccattacgtgtaacgttagttgcacatttttgttgatgccttttttggttgaagaggttgctttctgttcctagtttgagaatttctgtcatgattggtgttgaattttgcttgtgttgtccccctaccccagtgttattcatctgattaccaattttccggattattgttgctgctggttttttcataaaatcaggccgggcgcagtggttcacgcctgtaatcccagcactttgggaggctgaggcgggtggatcacttgaggtcaggagtttgagaccagcctggccaacattgtgaaaccccgtctctactaaaaatacgaaaaaattagccgggcatcgtggcaggcacctgtaatcccagctacttgggatgctgaggctggagaatcgcttgaacccgggaggcagaggttgcagtgagccaaaatcgtgccggtgcactccagcctgggcaacaagagtgaaaccccatcttaaaagaaacaaaattaactttgcagtttagtttatatatatatacacatatatctatattagaatgcactcattatatgtgtacattgtaacaaattttgacaaattcataaactcatagaaccatcaccaaaatgaagatgaacaacatttctaacactccagcacgttccttggcaccccatcctccttggcacccacccgtgtcagtcctcctcccccaattcctactaacctcagctcctaggaaaccactgatctgctttctgtcataaaacattgtatacattctgagcttcatgggaactcttttgtctatgacctcttttgcttcccataatacttctgtgatctatccatgtctggcatgtctcagttcattcctttttattgttgagtatgggtataccacaatttgtttatccagtcacctattccagtttttgattattatagataaaattacttagaaaacatatatctatatattgtatctagattattaaaagaagttttgcctcattttcttaacagtatcctttggagagcatacattttttatttttatcaagtccgatgtagtttattttttgagacagagtcttgctctgtcgcctagtctggagtgctatggtgccatctcagctcactgcaacctctgcatcccaggttcaagcaattctcctacctcagcctcctgagtagctggaattacaggcatgtgccaccacacccaggtaatttttgtatttttagtagagatggagtttcaccatgttggccaggctggtctcgaactcctgacctcaggtgatccactctcctcagccttccaaagtgctgggattacaggtgtgagccactacacccagccccgatgtactatttttattgttcattttttgtgctttttgtgtcaaacctaagacgtttttgccaaattcaaggtcactaggattttcacttacgttttctttttttctatttttgttttgttttgtttttgtttttgtttttgtttttttgagacaaaatcttactctgttgcccaggctggagtgtagtggggcaatctcggctcactgcaagctctgcctcctgggttcacaccattctcctgcctcagcctcccgagtagctgggactacaggcgcccaccaccacgcccaactaattttttttgtatctttagtagagatgagctttcactctgttagccaggatggtctcaatctcctgaccttgtgatccacctgcctcggcctcccaaagtgctgggattacaggtgtgagccatcgcgcccgaccaattttcacttatgttttcttctctaagttttataattataggtgtttcatttaggtaaattacctattttgaattaaaattttatatgtggtgtggtaagcgttgagtttcagtctttctgcattaagaatgatgttagcttggagagtgctctttactcctgtgttttcttttcttaaggggtttgtgtaggattggtacttttctttgaaatggagtcttgctctgtcatccaggctggagtgcagtggtacaatctcagctcactgcaacctccatctcccgggttcaagtgattctactgcctcagcctcctgagtagttgggattacaggtgcgtgccaccacacctggctaatttttgtattttcagtagagatggggtttcaccgtgttggctaggctggtctcgaacttctgaactcaagagatccgcccgactcagcctcccaaaatattgggattataagcatgagccactgcgcctggccttttctctttctttctttctttctttctttctttcatttctttctttcatttctttctctttctttcttggctttctttcttttttttctttttctttcttcctttctttctctctctctcctctttctcctctttctttctttgagtctcactctgtcacccaggttagagtgggcaattgcgtgatctcggctcactgcaacctcttcttcgtggttcaagcaattctcctgcttcaacctcccaagtagctgagattacaagcgcccaccaccatgcttgacaaattttttgtacttttagtacggttttgccatgttggccaggctggtctcgaactcctgaccttaggtgatctacccgcctcagcctccccaagtgctgggatttcaggtgtcagcccaccacgtggtggctgggattgatactttttcaaccttagatatttgatagaatttatcaatgaaacttggtcccagatttttttttctgggaagaatttaaatatgaattaaatttctttaatagttataattcagataattttttcttgagtcagtttgggtatattttgttgtttaaggtatcagatttattgacataatttgtctcaatatttcctcatcatttcagtgcctttgagatatgttgctatgttgttaatcatgttgataatgtttgtttttattattttttaatcagtctgcctagaggtttatcagtttaatagatttttgaagaactagctttggtttcaatcattttcactatttttctatttcactgatttctactctttatttttttttccttctctaattgcctgtgtatatatcatcacttcattctttttgtgtattcaagttttcttctgatattattgtgtttttgcctgaagcacttcatttctctcagtttagctaagtcttttggcaattaattctctcagcttttatttgcctgaaaatgtttttatttctgaagactattttcactagatatagaattctaagttgacagtttcagtattttaagagatgtcatatcattgtattctggtttgtatggtttctgactagaagcctgaggtcattcttaatttttgctcattaatatataaaacacattttcccccctgtggctacttgtttttttttttttttttttttgaggcattcttgctctgtcattcaggctggagagcagtggtacgatctcagcccacagcaacctccacctcccaggttcaagcaattctcatgcctcagccccctgagtagctggggctgcaggcatgcactaccatgcccagctactttttttgtttttttgttttgagacagagtttcactcttgttgcccaggctggagtgcaatgatgcgatcttggctcaccacaacctccgcctcctgggttcaagtgattctcctgcctcagcctcccaagtagctgggattacaggcatgcaccactatgcccggctaattttgtatttttagtagagatgggatttcaccatgttggtcaggctggtctcgaactcctgacctcaggtgatccatccacctcagcttcccaaagtgctgagattacaggcatgagccactgtgcccggccccagctaattttttgtatttttagtagggacaagtttccactatgttggccaggctggtctcgaactcctggcctcaagtgatctgcctgcctaacatattctaatacttttcccagagtctttttgtttcaatttttcttttttttaagcatactgaaatttaaaatgtttttactgccatcaaatattttttctatgtttgttaacctttatgcctgattgccctttcttccctgatatcagataaataagtacccacacattttctttgagttttcatgcaatgaagagtaatttaaaagataataaatgtatctacaatttattttcaaatagttcagccaaaatgaagttttataaacatacacagacacacacagaaagtaaatatgttaaaatgttaactactggtgaatctagatgaaggataaatgagtgtccattatactgttccttcaacttttaagtgaatttgaaatttttcaaaatagtaagttggatggggaaatattctttgccataagctagaaattagctaagcttctaggtgttttgtgacccaccttatcatttgaaatatccttatcctacagtagtctgtggggtttataagaagtgttctgctgcattaaaaaaaagaaatttaaaaatatagtgaataaaggtcatcttccatggctgaatacattaccaaaaatgtaatttatagaatttcgttttttagcagacaagtgtcttaaaaactcattcattaaaatgagatgtgttgtgtggtaatgtgacccatttccatgttatagttgagaaactgggtgttcagaaaaattaagtgacctaggtagtacctcctgagctggaattaacccaggacccctgactctagtcctgctttttttcctctaaagtgtaaaccatgactactactactaactaatacttctctttccatctccctctccccattctctcccaactgcccacctccagaagtaagtatttaaaaagaactaacatttgttagattttttttaaatgttaagcctaggtatatcatttatagaagaattaaataagcttgaaagaaaaaattacctgcagttttaccagttaaaagttattaacattttcatgttgattcttccctatttgtgtgtgtattattttaattttagtttaatttaattttatgggtttttttttttgttttttgtttttttttgctgctgctccttgtgtaacagggctaacccataggcagtgtgtccagagtcggcccgtatgaatgttttaatgtgctcactttgtacattctgtttaactttacttttgcttaaatacgtgcttaacttctttttgtgtcaataagtttacaactgtattgttagtggctacttagtattccacatatgaataaataaagttatttatttaatcaattttcatacatttaggttacctgtttgttcagaagtacggtgttgtgacatgcattttttttttttttttgagatggagtctcactttgttgcccaggctggagtgcagtggcatgatcttggctcactgcaacctatacctcccagcgattctcctgcctcaggctcccaaatagctgggactacaggtgcatgccaccaagttcagctaatttttgtatttttagtggagacgaggtttcaccatgttagccaggctggtctcgaactcctgacctcaggtgatctgcacaccttggcctcccaaagtgctgggattacaggcatgagccactgcagctggcccgtacattatttagcttgttttttctgtatgcattcttacttgtttccttaaggtagatttcttttagtataattaattacagaccaggttgatttttaaggttcagtgggtatttccagattgtcttgcaaaagagtagggccagttcttaactcctgacaacagtgtataaaggtacccacttcttggccgggcatggtggctcacgcctgtaatcccagcactttgggaggtcgaggcaggcagatcaccagaggtcaggagttcgagaccggcctggccaacatagtgaaaccccgtctctactaaaaatacaaaaattagccaggtgtggtggccggtgcctgtaatcccagctactcaggaggctgaggcaagagaatcgcttgaacctgggaggcagaggttgcagtgagctgagattgtgccactgcactccagcctgggggacaagagtgagatgtcgtctcaaaaaaataaaaataaaaaaaaataaaggtacccacttcttctgtatccttgctgacaccacatgtttatcgtttaacaaaaagattgttaatttgatgaatgattgtttttaaattaaacgtattatttgttagtaaaatttaacatttttttatttgtttattggttatttttcctgttttgtaaattgatttttcatatatgttgcccattttgctgttggtttattttatattgagttgttagagtgcatgttttgcaaatggttttcctatttaatcatttgcctttttaatttgttgttactgttttgataagcagaagatggtgtttttgcatgtgtggtggtggttgttgttgttgttgttgttgttgttgtttttgagatggagtcttcctctgtcacccaggttggagtgcagtggtgccatctctgctcaccacaacctccgcttcccgggttcaagccattctcctgcctcagcctcccaagtagctgggattacaggcttgcaccagcacacctggctgatttttgtacttttagtagagatggggttttaccatattgcccaggctggtctcaaactcctcacctcaagtgatctgcctgcctcggcctcccaaactgctgggattacaggtgtgagccatcatgcccagcagaagactgttttttattttatccatcaatttttcttttttaaaaactaatgtattttttatcttttgcttttggctttcctgaacccacgataatgtgaatcttttttttttttttaatttgaggctttttgtgatttgctaataagcctcttataaatgtttgctattacttggctttttttatgtaagatatgaggtaagaatctaactcttttttcttcaggattggtatcttgctgtttcaacccaagattgtaaacttcatgaagggagatatcttgtctgttttgatccaccaccctattcctgttatataagtaggcacttgaggatttggtttcttattaaatatttaatatttagaaaggaagtcagtggaaaatattcatttgtaatattaattctttgcatcagaatattaatctttgcatctgatgcatcagatgcatcagaatcacctgaggagcacttttgaagtctgctgattcaaaatgtaatctctttttctgttatatatgtttctgtaacacaaatttgctcatatgcatatagtgggagaatgacattaatgtatcatgaaagtcctggtagttcaccaaagatctttctttatgcattaacatttctaagttctcaggagtatgctgtctcataatgaaagaaaaaggcttcacaacacatgaagacttaagaatatttgaacattctgcatttagttttcatttagtgcaaatagtagctggtttagtgaatttaagaactgtcgtgcttttcacagtgttagtgaagattcaagcattgaaaagacaatgtgaagacaaattttcttgtatttttttttagcgttgataaaggagggagggggagaaaaagaggttgataaacatggttatatgccaaatctgattttttttctttttttttagatggagtctccctctgtcacccatgctggagtgcagtagtgcaatctcagctcactgcaacctttccctcctgggttcaagccattctcctgcctcagcctcccgagtagctgggactacaagtgcccgctaccacacccagctaatttttgtattttttagtagagacggggtttaaccatgttggtgaggctggtctcgaactcctgaccttgtgatctacctgccttggcatcccaaagtgctgggattacaagcatgagccaccatgcccggccactgatattttatttagatgaaacatactggtttattttggaagccaatgacctcacggatttacatcttaagagaggaatcataaactctagggcttaaagctgccaaagattgattgtatgccagatgcaaaggatactggagctttaactctattaagtctattagaattgttattgcttttattggtgctttccttacagaactgtacaggttttagggtatagccataatcttattttcccagaaggcctctcagattcagtgcatactattacagaatatgaggcttttcatcagtgtatattagctgaaatatctgtactacggtgttttgaagcaactgtccagttatctcctgtaggcattcttggctcagaactattgacttttcacagttccttaatcattatttaatacattttagggttctgtaatcctgtgaactaccctcattgtaggtttctgatagtctaagtaaaattagtgctctaaactttatgttttataatattgcttatatctttacagcagactggaaattaatagggtgtgtgtggatgtgtgttggagtggattttgggtgaaggggctttcattctgctacagctctgctgatttggaggtgcagtgggatgtttttggctaaggaaatgttacgtatgctgtagtgtgggctttatggaagtaggcccagagatagtagcagctgaagttcctaggtcacttctctgactcgtgtacctcagttttggtttggaaagcctgaaaacttctgataggaacacttggccatgttatagttgttaagttgggtggacacacaggttttacctggaataatactatttcccagccagtggttcagaccatttgaagagccattgcaaggaaatggctgagaagttggtatcttcgtcatgattgcattatttacctataaattctctataatttcagtattgttacactagaggctgatcagcactaactcacctgactttgtatagcttttaggctcttcagaatagtacatggtatatctaaactataaaagtgaggtgagaatttgcatatatgtaaatatgaaagttactgctaaaggtttcattagacacatattacacatggctctgctgtggtttaaaactgactgtttcatttaaggcaatctggactctattagtgagaaatgaattgtttttcttggttttattctctaaaggatccagcatttggaggcaaacatgaagctccatcctctccaatttcggggcaaccatgtggagatgatcaaaatgctttaccttcaaaactttcaaacgaagagttaatacaaagtatggatcgtgtagattgaaaaattgcaaaagtagaacagcagatccttaaactgaaaaagaaacaagtaaaagtctttgcctaatatattctaagaatgtatgtttttctccctacagaagataattttgagttttccatattttgaaactttacataaaaggaatcatgccttacgtattctgacttgctgttttttgctactattgtggttttcttacattcattcattttccttgctgcactgtctgattatatgattgcagagagtgaaatttgtttttccattctatttttgatttttttttgataatccatacaatggtgctggtttttggttcacatgtagagattttccagggcatgtgcccaggattggcagtgcttggcccaagattatgcacagtgaactatttaatagatgataccaaatttgctaagaagtaacaccattttatattcccactggcagcttatgtgggtacttatttgtgcacattcttgcctttacttgatatcattttttcagttggatatgaaatagtcttgtgtggtttggaaggaggctgagcttattttcatttgtttatgagttatttgggttccttatgtgcattgttcaagtcttttgtctatagtctcctatttcatcattgaaacttttaggatttcctgaagtcccttgtcagatatgtgtatagaagatttgcctagtttgaggcctgtcacttcacttttagcccagtatccattctaagtgtacactaagtgcctttttttttccagatttggagtctcactctgtcacccaggctggagtgcagtggtgtgatgttggctcactgcaacctctgcctcccaggttcaagcgattctcctgcaacagcttcccgagcagctgggactgtaggcgctttaagtgcttttaatgtattcataaagttgtacagctatcacaactctctaattctagaacatgtttatcatttcaaaaagaaactccatacttactagcagttactccccatttcccccttttcccagcccctggcaaccactagtctattctctgtctctatggactagcatatgccaaataccagaaaaaacagaatcatatgtgaccttttgtgtttggcttcatttatttaccatgttgtcctgattcatccatgttgtatcttgtctcagcacttcattgctttatatgcctgaatcccattgcatgagtatactgttttgtttatccatttattagttgatggatatttgagttgtgttcattttttgactatcattaataatgtactgtgatgagattcatgtactcgtttttgtgtggacgtatttttacaattttctttatgtatctaggagtgggcgtatggtaaatctatgtttaaatttttgaaaaacttcaaaactgtgttccaaagtctctgtaccattttatattattaccagcagcgtacggaggttccattttttcctacctccttgccaacatctgttattttccttttttaaaaaaatatagccatacttgtagatgtgaagtggtatctagttgtagttttcatttgcatatccttaatgactaatgatgttgagcatcttttcatgtgctgattggtgatttgtatatctttttagagaaatgttcatttagattgtttgctcatttaattgtgttgtctttttgttattctaagaattctttatatattctggacattagttcctcatcagatgtatgacttaatagatattttctctcattctgtgagttcttttcactttcctgatggtatcctttgatgtacaaaagttttgaattttgttaaagtccagtttgtttttccttttgtcactcttgcatttggtgttgtatctaagacccattgcctaattcacggtcacagatttatacctatgttttcttctacaaattttatagttttaccccttatagttgggtctttgatcctgatagtgtttttttggtgaacagaatttgtttaggttttacatgaaaacccactggggctattaaggtagttttactatattatctttagaagttttatgattttccttttcatcttattgctaatccactggaaactacatgttgtatagtcagtgttcatttatatttactcacatatttgtcttcttacgtactcactatctattctcgcaactcaagtcttccatctaggggaacacccttctactgaagaacgtctcttagaatttcctttagtgaaggtctcttagttagcaaattcagtatttgtttggtttttatgacttaaatattgtcttatatttggcctgtttattaaaagatatactaatttcgtatgtgattattttttcttagtacattgtcttcctgcttccatttttaagacattagctcttggtctaaatccatattctttcatggataatgtgaattttctctcggttgttttcaatatattcttttcttcagggttctgttatttttatgatgatatatttaggtgttttattttccttttaaatctgtccaacttgagcttcatgaatatgaagggtggagtttttcatcattttgagaaaattccaagccattatcttttttacaaaacctttctaacagtttattattttacttatgaaatcctgttagttgtaatatcttgtcactcttgtcttccacgtctcttgtttttttcttatttttttacttctttgggcttcattctgagcaatttcttcagcctgtcttccagtttacattttccttttcaattatatgtaatctgctgtcgaatctgtcttcaatttcaacaattatgtttttatttctggaatttctatttggctccttctcaaatctgcctggtcattttttaaaatgttttttgctttcattgagttgtattaaatttttgttatatgcccaacaattctaattaagtctttattggtttggatttgctgagtctcttttcttttttcttttgtctttattttctttacttgtacaatggtaatctagtaataacaccaactaaatcacatgattgttttatgaattgagataatgaatatattgcataatatgtggtacatagtaaatgtatatgcaatccattataataattagaaataatgaaatataatgtatgattattatgaaatataccagagccacaaattttattgagcgatacaaaggacaactagagaaaacaaagaaatatgccatagctggatggaaagagtaataataatgttgtgtgttcatcttggactaaatcatgtctcatataatttcaataaaattccaattaaattcatttttagaacatggcaaatatattgtaaagttaatgtaaaagaacaaacagggccaggctcagtggctcaacctgtaatcccagcactttaggaggctgaggcgggcatatcacgaggtcaggagatcgagaccatcctggctaacacggtgaaaccccatctctactataatacaaaaaattagccaggcattgttgcaggcgcctgtagtccccgctactcaggagtctgaggcaggagaatggcgtgaacccaggaggaggagcttgtggtgagtggagatcacgccactgcactcaagcttgggcgacagggcgagattccatctcaaaaataaaataaaataaaataaaaaaagaaaaagaatttgtgtcttgtttcctcattaatgttggttgaaagcatgttgacacttgtctttgacttgtgttttattaacatcgattggtatattaaaagttcctctgagcttaccttctctaaaaaaatataagaaaaagggcctgtgggaaggactatgaggcagaggggctggtgtgagcacatgctgggcaggaggaaagaggtaatgaccaggaccagggaaatccccaaacccagcaagtcagggagccaaatgaaagcctttcatcctgtatcggccacctaaccccatcgacactccaagtgaacattctcttttagagatactcattgtcctgtttcttctgtaatcttgtaaaggaatctgatttctcccattagcctttcacaggactaaaatttcacattagaatgctattgtttagaaggcatcttcttagattaggctgcaaggagattgaggaagttactgtcagtcacttataccccacagggacattaattcaccagagctttggtgggggagtagaggagctcattacaagcaggtctggatgctgcacagagtgtaaagggggcagaaggatccaggacacctaggcctggagatatcgccaatgctgggaggtactgttattatccccattttacagaggaagaaacagacacaggcaggtaatgttatcaagaccacgctgccccacagtacaggagccaggatctaagcacaggcagcctgccttgccatcagagctctcacccataaccctgtgctgcagttaagcagcattgccctgtggccagggggcacagcttctgggttcacgttccagcttctctaccatttccagctgtgtgatcttgggcaagttacttgtctgtgctcagtgtcctctgcatagtgggtgtagcaatacgtgcctcatggagtcccttaagtgagttaatagctgtaacatgcttagaatggtgccatgcacatcatcaccatccactgtatatgggccatcatgcctgaattccagatggacacatatccttgaagggtctaaaatctaggatcctgaaatgcctggcagtgggatcctgaaatcctctggcagcattttaacatattttggctgcagaattgtaccctgcttcctggggctagaaggtgtgggatcagctgcttactcagttcaaccccaaagtaggcaaagaaggttttgtcacaggcttccctggggccagcccctgtaacctccccttgtccctcccttgcatgcttcctcacccatattcacacatgaactccaggccttctgggccccaagggaaggagagaaggtgggaagtgggttcactggtccaccgaagcatgctgcctccagccctgctgcactggtgggtccagggaatgggcctggagctgaagggctcttgccctccctttaactttaaaccttgacttgcagtgatccaagagcttcatctcttcctgtgagcctgtctggatgtttatgctggatggcttgggccccttctttcaggggtgcacaggcaagggcctgaccggcagccatggcagatgaggagactttggcagatgagaagaccttctacttcagcttcaatgtatgggtcttctcctggctctcagtacattcctcctgagtcatgatgggctccagttcagtgaaactctgtggcagcatcatggtgtccaggggtttaatctggggcatgtgccagtgctaccccaaggtatgtggttgtgggtgtgagtggagccagaagggctggatcttgttcctctcttccatgtatcagccccatccttcaatcatcttgttattttcattttgactccctgttttattcggtattctcttctgagcacccgtccattcatttatccattcatccatctattcatccatccattcatcccagcatcaatctatcaatccatgcatccatccatttatttgtccaaccacccatccatctatctgtccatcatttagcataaggattgatcagaagcctcctggttctggagccatagactagacaccatggggagacatgatgaaaaataacatatgatttgtgtgcttgaaacaaaagctaatgagtgcttaccacctgcctggcagtcctgcattcagggtgcagttctcccctcatcctgagctttttggtaccttctatagtttcactttgtagtagagaatgctgagcctcataaagtggggacacacagctgcgtagagtttggattggagctcagatgtgtgtgacttaggcatcaccctctgccttgagtcctccactccagggtctcagagctgctgagcattctggggttggtcagctctaaccttggtggcatgcattgagcaactctccatattttggagtcttaatgtattcctagccttagtgatagcaaggactctgctttgggagacctgggtgctagttccagccctgtcccaaactttctgtgtgatctttgtctttctgagtccagtatttgcatctgcataataggacacaagcaccaattttcacagcctcctaggggtattacagagttcagacaacagaagagatatatgaatatttgcagaccgtagagtgttttatttagatgatgtgctttcaggtcctgacaaccctctggaatgaacatgtcagaagttgtaaaccttcaatgcccagagaggtggagtgacacttccaaggtcacatagctagtcagagacagacctagggggaagaaatgagacaaacatggattctaacttgggctctgtctctaactgcctgggatactgctcaagccccttccctctctaggcctcagtttccttgtttttacaatatgtgatacaggatgaggggatggatggggaggatatcggggggccctgctagaactcacctctagggcccaggcttgggaatccccagaacccccatattgtcctttacacctgggtggctgtgctcaaggactcagggagggggaactcctgcggccctggtcttcctagcccttccccttctgtgggcccaccctgggctgtcagtgtgttaggtgctggaatggtctcacctggtttgtagtcatttccaaggcagtttatggtaacctcacctctgtccataccatgtcctgagcagaggtcccggggagaagtcctgggggccagagccacccatgtcaccactagccatggtagtcctcttctctgtgaggaggctgcaccctggaagatggcatcgggtggaacggagcatctgtcctgacctccccgttaagcagaggtggctctgggactgtgggcagagatactggagtggcagtgggaagcgaagtgggggaggaaatattgctgggtactaatgagtcagagttgatagactcatgtcttcatgtgctgtggaggaggcagtctggtggggtgcagatggcatatgttttggtgacctacaggcttactttcaaatagctgttacctcatgttccacgtctgtgaccttggcaagtagagctcctcaaccccgaaccttgcactgctgagtgggagaaaccagaagggtcttgtgttgtcagggacctggtatcatgcctggcacagagcacttgcgaaatcttcattctcaagattggcatttgtggctctgggggatacacagggaggtctgtgcatgtatgggcaggtacatgtggataggtgcgggtctgtttgtgtgtgtgggagtgcatgtttcagggacacaggctatcaaaaccagcacaaggtgactccaataagggaagggaggaaagcgcatggtaaaccacgaagacactctagacatgaggcttcctgcatcctacatggcctcttggtgcctgtgccattgtagccttcagtgctcacgcttgtcctaccctcagggtcctgccctggatctcagtgcctggcttgtggaaagcgtcagtaaatggggaaacataaacataagggaatataactagctaattagggtaattcagtgaggagtagccatttccaacatgaattaaactgtccctgattattaggggctggaggtctagtgagagagacaatttgtggcatgatggggaggaagtaggattcacagagaaggtgagcttggctttgtaggttaagtagaaattcaccaggcagagaagatgtgggaagacgctccaggcagaagagcaacaggatcgaagccatgtggtgaaaggacaaggcaagtctgtcagcaatgctactagagggggaggggaacaagtcagggtggaaatggacgggcctcagctcctcagtgcctgggatgttatgctaaggaatttggatcttaccctttagtcaaagggacaagggagggacatgaccaggtttgcagtttgagaaaattatcaggctgatatctggaaagaggatggtctggggcagcgagaccagtgggaggcttctctgctcagatgagagatggtggtcatctggattaggcagaatttgaacccaaggctgtaggaactgagaagacagttccagtttaccatatgaggaatacctgctgtggctggcagggcaccagcacttctacccagattatctcactaaaattctaaagtagacctggtcagctctggaagccacctgggcctcaggcatgagagaggaggaggaattggggcaaacctagtgggtgggtgcagttggagatgctgagcctattagcaaagacgggacaggaaagtggggagcagggaaaggagtggcagggagagtgaggcctttccctgcctggcttcagcctttacccatgagcctcccgttcctcatttctgctggacccaggaccaggaccctggctggtgttgaaggttctgtctcctctgtgggcttccctccctctgcttcttccttctgaggattgctcaatgttctgcctaaacacaaatctgactgcatactctcctgctgataaaccttcaaggatgcctctgattctgggcaaagcctgagcttcttagttttatgttctgggggtctccattgtttgatatcccctccccagcttcaactctgcctgttcttcctcatcaaagtacctgtattttaatatgctacctccttccttttcctccaagattttcataattgtggttgtgatgatgatgatgatgacggtgatggtgaaggtggtgataatgatagtgatagttatgttgaggatgatggtgaggatagcgatggtgataatgttggtgatggtgaggaaggcgatggtgaaggtggtgataatgatagtgatagttatgctgaggatgatgatgatggtgagaatggtgaaggtgagcatggtgatggtgatggtaaagatggtggtgatgaggtgataatgatggtgatggtcaggatggtggtggtgaaaatggtggtggtgatgatgatggtgatggtgaggatggtgatagtgaaggtggtgatgatactgatagttatggtggggatgctgctgctgatgctggtgagaatggtgagggtgagactgatgatgataatgaggatagtgatggtgagtatggggatggtgatggtacaccccttgatctggcaattcgacatctaagaattgttcatttcttctaggattttttttttttgagtcaagacttccctatgttgcccaggctggccacgaactactggccacgagtgatcctcccactttggcctcctgagtagctgtgattactggcatgaaccatggtgcctggctttaccctaggaatttatactgaggaaataatcagacaagtgtgccaagtgatacttagagaaggatatttattgttgcattgatgatagtaggtaagatgtgggaagaatgtaaatgtccagcaataagagattggctaaataattgtgctacagctaggcaaggggctggcttatggccattcagaacacactccctcctgattgagtcaaatctcctgtccctgctctcacacaccacacacctcccaccttttcagcacaaattacagtcgtaattttccatttctttgtgaacctctttgatgagtttctgtatccctcattagatgctaagctccatggaggcaaggagtatactatgttcattattgtgtcctccatgacaagttaagttcctggaacacagtacactctcaataatttgttgttaaatgaatgactgaatctgtatttctcagtatggaatcctgtttgaaatatgcaatgaagagaaagagcagattataaaacagcatgcatactgtagtacacactgcaaattccctcctttcttgatcttctttgggggaccacatgtgcactctcagtcaataaattatgattgatccaaagtcaatcatgacattgctattctctactgctagggatggtcatgagatcaggttctggccaatctaaacacagatttccagacctaaagagaaatcctctgggggtcacctctgaagttcttgcttttctaataagaatacggaagtgactgcttttgctggccttgtaaactcatgtagtggttggagctgcagtagccgtcttacagccatgagctaaattccaatagactcacaaagatgatgggcctaaaattgttgaaccagtgaaccatagccaggaaccatagatattctaactacgtaagaaaaatgaacctgtctttgtttaagtgactgaactttcagattaatgcactctcaacagatacagagcatgatcccatatatacctgtatgtgcaaatatgaatagaaaaataattaaagtgattatctctgtctggtaggattctccttcatatttttttattttataaagttttcccaaagggcatgtaaataataatcagacaaatatttctgtacattcagaaaataaaaaatggtactaattttatttttaaaaaataaacaaaatattggggccccagaaggtagttcactaccatatgataagttaattagccacgaccgagatgaacacttgtgggtatcctggaggacaggttcggcagcagtgggaggtcccctccagaacagtatgtggttccaaactcctgagggaggcgggacagaccccaaggaagtagatgagaacctgagtgaggctctgtggggagagaggatgttcctcagccctcatgaggacatgtcagttttacttgagattaggccctggccttggctgggcagcctgccaggtaggttctcagcagcatggggtgataacaggaggaggggaaggctggcaagctgggatagctctggggtcttcaggtggggctgtctcgggtagcaactgtgttggctgtaaacacagatttccaggaagcagagcgttgcaatctcttccaccacaaacctggaccatcagggatgtttccatagcagcgtctatgctggtgaggaatctgggcatgatctgtgatcccctctcccactttttcttttctcttagaatgggacagagcagcctggagcagctagtgtcctgtagtgactccagtttgctgctctcttccttatcttcttcctcctgccttctgtctgctctgcatccttcaccttctacatcaggaagctcaagtcaccgggctgagcctgggcttctcatttaaatcacggagtgccagtcaatgcctcccttcctcttcccagggagcaacttcagtcttcactgcctgcagtggggagctagaccctgctccttattccctgtgggaccatccgcagcctgtttcctcacccctgtaatgggacagcagtcctccctgcccacctggcagtgctaattccaggctgggggccctcctgggaaaatcactagtgtgggtgacacggtgggtttttgtgtgtgtggaggggtggggctgccacctggccatttacagaccccatccttcctctctccctgtgcttgtcacatgtcaggagtccctctcctttgcgccatgatacataagacattttcagatccatcatctcattgagccttgcatctccttggtgaaattggagttattgtcaccattttactgatgagtaaaatgaggctcagaaaggggaacatcgttgccagggttccgccgtggacttatagcggagctgggattatgatgcatgttctggattcctggcggggtcctggcccatctgcagctaaggcctttctttctgctcccatgaggtccgttttccattcctttcctccccatgacagccactctcaccaccactcagggtctgtgctcactgtcacaccaccccttgctgagccctgcgtctgggctggaacccaccatgtccatcagacggattttcctcaatggtggttgggctccaaatccactctccccagactgacacaaattgcactacagggggctgcaactgtaggcgtttctggtctagagagagagagatagtcccatagaaatgtcaacatcagttggtgaagaagagaatggaaacacaggagaaagttcagggagtgatgtcaggaggaggtggcccttgagttgggtcttgagggatgtgtaagagttaccaggcaaggaacgctgggaagggcattccaggaggaaagagcagcattctccaaggctcagactggtctggtggctacaaggtagagctgggtgacctggaccccttgaaacagtgctcccttttcaggaggaaatctgcagctcccatactttgggctgtctcagagtcccccagagatcttgggaaattcctgggtcctgttcccagggattctggttcaggcagaggaatctgcgtttctcacaggcaggggctgtgacctcaccccacagttctgatgcagttggtccctggatcactcttggagaaatacaaacaggactgagaggctttgacccaagcactgtgcagggggtgggatggggatagatgtggaatgggccagaggaatagtggttggagctataccctcctggaccaccttgtctaaaatgtggctctcccatccccctttcctactgatacattctatcctccacttttcctttattttattttattttattttttgtagatacagggtctcactatgttacccagactggtctcaaattcctgacctcaaccatcctcgcatctaggcctcccaaagcactaggattacaggcatgaagcaccatcctctcatcaccaactcacatgctgaacatttgactagtttatttattacctgtttcactctactggcatgagggctacatgaggaaagagactttgtctatgtcattcactgctgtagccaggtgtctacaatgtgtaaggccatggaagctgtttctgttttggtttgtaattttaattttgggaagcagaagatatctgagtggactcagtggctgacaggaaaagggagaacagtcttggtgtgcacaagagtgacagggagatctagacagagagacgtcagaggacagttcctggaaggggctgatggaaaggtggggcaactggggagggtctctctggacatcaattcctttgaagctggcagggagggaggaagtgcatgggtggagaggaatgcttgaagaagacctccttggcttccatattcttcatgaagtgacaggtgaggggcttcctgggaagagagggcaggaggggagcaaatgtaggctggtgatggtgggcctgcagcagtgccccagggtgaaggggtgaatgtattactgaggctggatcctggtcatgacccttgccttggcttcaagactcattaaaaaccagcctcctccagtgagcttagatcatgacactgcactccagcctggagacagagtgagactccgtctcaaaaacaaaaacaaaaaaacagcctccattcccaatgttcccagctggaccatgcgctgcttcctggatgtgccaccaacacaactggaacacaaatcctgagtcactgcctctagaaagcctgcctggattcagtgcccatctgactgggctcctgcagcacctggtctgccactactatgtgacttacctctgcctgcctcttatcacaggtgcctgtgtttttacctgcctcagtgagggctgttgaggaccgggccaggctgatccatcttaggggctacagtaggtgccagcaatggctggactgtgtcagggctggacaataagcaagccaggttctcatgctgggcactgggtgccctttgtgggctcaagtgggcatcaccactgcttctgagtggccagaagattcctgggagaggcctggttatcttgggctgaccctcactccccagttccatcctccctccctcccttgctgaaacccttttgcatgtcctcaacatcctgctccagcaccagcagccccctggttttcagcagcctcagggaactcttccttttcttccttgctgtgagtaacaggcccaatcccctgaggacactgctgccttgcggtcctctgctgcagcccttccctggacctgagcaggataggtcctccttgcttctcattgcctccctctttcagctcatcatcctgctctcccataaaaatacattcatgtgccatgaaatgatgtttccatcaacccagatcgcatgtgcagtggtggatccatgaaactataatggagccgaaagacacctactgcctagcccagtgacataacaattgtaacgttatggcacagttactttaaaaatatatttattaaaaaagatttataattctatagaaaaagaaatatatgtcttgtagtgtagcctaagtgtccagtgtttataaaatctacagtagtgcacagtcatgccctaggaattcatcttcactcaccactcactgactcacccagagaagtttccagccctgcacattccattcatggtaagtgtcctagaccagtgcaccatgtctaggtaccatactacatttttatatagtgcaatactatgtttttactgtatttttcatgatatgtttagatgtgcaagtactgaccattgtgctacaactgccaacaatattcactgcagtaacctgtgcccaggtgtgcagcctgagagcggtaggctgtgccatagagcctaggtgtacagtaggtacaatattgaggtgtgtgtaagcacactctgtgacgttcacacaaagaaaaactacccaaggacacggtgacacacgaagggaatcaatattgaagctcttgccctcagattgcacccagggccacatccctatgcattgaagacttagctcccagttcatgggcactttttcctgctgaggtgattccaacatgcacatagagagtcctcctcatgttctggctcttggtccctccacccctagagaccttgtctccaccctccctgagtcacccactcctacctgtatattcttgtcactgcagaaactgtagctactccagactctcaatttcaaacacgctttttttgaccacaactttcctttttccagctgcctcccaactccaagacacttcaatgactccaaattttcacttttgtgtctcactctgtttcttgcaaatttcccctcctcccagctgagactatatggtccagcctgtcatccaccctctctaacactctccactctcttgccccacaattaattgtgctcccagggcaaaactgcactctgctgaaagccagccacccgctccctctgctcctgcagtcaggtggctgagcacagccagagagaaacacacgtgccttttgctctcacttaatcatcaagcccaaacctccagtgggccctggatgatgtcctacaaactcactcatttcccaagtccataagtctgccagacttctttatttgttatcttaataaaaatatatataatctaagtattttatgaataccaactgatttaattatgataaaactctatgaatctgttctataataatcaccatttcacagctgaggagatgctggcacaggaagagatgaagtgacttgccctggagcccaggcacccagctctggaagtgctgccctgtccccaagcaacagtatcgtgccttctccttcctccttaaacctctaaaaccttccccagccttccttacacctgctgccttgcttcccacttcaatttgaaaatagatgcaataaagagagaaccttccctggatcccacccccacatctccccagctgcttgcctctgtgcttccttctccaccttcgcttgttattgtagctggagtgtctgcactcatgttaggggtgaattttctccatcatatccatagttcaaccctcaggttctttcctgagtgtccactttgcacactgcccggttccgcaatgcagctctcccacccatctcacaccctgcatgcttatttattcatcatctgttctgctctactacagtgagagctacacaggggcagggattctgggtatcttatgcactgcagattccaacatctagagcagtacctggcacctagaaggtgttggtatttaatgaagtcagtcattttatatgtcaggctctggcctggtgctggggacactagggtgattcagacaggtccctgcttgtaccaagtttatagtcccataggggagacaaacacattacctgacaaatttgcaggcagccatttatattttgcatctaacaaagcagcccttattgtacttgagaggaaatgcactcaagccgttagctgtagccccacttcccctgcttcaggacagaaagccccaggctccagcccttacattcctgggcctccagggctccctggactttaggaaacagctagtaagggagtcaaagtccactttgactcagagctgtgggatgtcaacaaggtgcttcccctctctggtcctcaatgtctttgtctattacaagagatgatggtgccagctcagcaagctccactgggctggggcaaatgggacagggagggtgacaatgctttgtggacagagaggaggaattctgagtggctactggaaaggcagcatgtttatttgacaatttcaaacatgacagaactgcggaacacagacatcaagactcctctgtaattccatttggagtttaaagctcagattttgttttgtttaagcagtggcaaatgttatgtatagatatagatgtgggatcataaaatgtgtttaaaagttattgatgtgggacaactttgcatatcaatatacaagcatttattttatttgttttaatagctgtgaaatatcccactgtatgaagagactaaaatctgtccttctattgtggatatttggattgatgaaccattggaacaaatcagagaggccaatcaaagcatttgacagcctggcagatcaaagtgagaggtttattacagaagacagtaatgctaaaaggggaggagagctaagtgaatccacctgctgcaatcagagtccagaatcccaccaaaataagatgcaggagacaacgcggccaaaagggcagaggcccccagggctcccagcagagccagatgcaaacttgtcatcccaccctgtgtgtgggcttcctatgccctggacagtctttcctgaggccgaggctgttttaagagcttagagcacccattctacggcagaatttcttatgaatgaggtccctgttctgtgctcctcacctatcctgggcccttttcccaacttgactttgggtagtgggtgcatataggccccaggtaaacaccaggccccaggtggacatcagggctcaggtggacatacagcctccaggtgtatatcaggccccaggtatataccattttcctggtatgtattagtaaccaaggggacactggactccaggtgtacatcaggatcacaggtggacacccaggccccatatggacaccagcctacaggtgagcatcaggctgcaggaggatacccaggccttaggtagatatcaggccctataaggacaccaggcctcaggtggacatcagggcctagctggggactcaggttctaggaagacacccaggcctcaagtagcatcagggccaaggcggatactagactccaggtggacatcaggtcctaggtggacacctgggtccctggtgaccatcaggccccagattaactgcaggccttcggtgaacatctgatcccagttggatatcagaccccaggagaacatcagtccccaggtggatatcagcttccaagttgacatcaggccacaagtggacactggacttgaggtgtacgtcaggcctcagatggacacccaggccccaggtgtacagcaggctgaggtagaaatcaatgtacaggtaacaccatgccctaggtggttacctaggcttcaggtagacatcagaccccaggtggacacctgggtctcaggtggtcatcaggccataggtggaaactcaggtcccaggtgcacatcacgtaccaagtggacacccaggccccaggtggacaccagcctacaagtggacatcagaccacaggaggacacccaggccccagatagatatcagactccagaggaacacacaggcctcaggcggacatcaggtcccaggttaattccaggccccagatggaactcaggccccacctggacacaagtccctaggtagatacacaggccctgtaggccctggggaacatcaggccttaggtgaagttctaggctacaggtggacatcttgctccagttggacatctggtcccaagtgaacatcagtcttcaggtggacacaatgtcccaagttggacatcaggcaccaggaggactttagtcctctggtgaacaccagctcccaggttgacatcaggctacgagttgacacccagggcccagatggacatgtggccctagatgaacactagtccccagtcagctggggcctgggtccacctggagcctgatgcttagctagagactggatatccacctgaggccaaggtatctacccagggactggtgtcaaagtggggcctgatatccacctggggactaggtatccacctggggcttgatatacacctagagccagatgaccttccggagtctgatgtccaccacaggcctgggtgtccatctggggcctggtgttgatttggattccagtgtctacctggaacctgggaccatgtagtccacttggagcctggagttttcacctggggcctggtagacatctggccccagtaaacatcagcgtggggcctcgttgtccacttagagcctggagttttcacctatggcctgaagatcacctgggacccaggtgtacacctgggacatcaggctccaggtgtaaacccaggctccagggtacaacaggccccaagagaactccagaccatattaaacatcaagtctcaggtggatgcccaggccccatgtgtacaccaggccccaggtagacagtggacaccagctgaacattagctccaagtttgacacccatactacaggtggatatgaggccccaggtgaatacctatgcttcaggtgtgcatcagtccccaggtgaacataaggccacagatagacatcaggcctcaggtgcacatctggctccaggtaaacatcaggccttaggtggatacccactccccaggtggacatcagagaccaggttgacacaaaaaaatcccagtgggtatcaagtcccagtggacgtccaggctccaggtaaacaccccagccccactgtaactgtaaccaccataacgagaagtggtaggtctaagtaccatcatgctccttgctcacaaaaggatgcttagctattttattcaaaatacaactccattcatcactctgagcagcgatgtgtagaaaggaagagaaaaataaaccaggcttcaaggaatccatccaaaatgaggtagatattataagggacagaaatccccaaatgaaatgttatagttgacatagaatagtctttaaaacccattaattttctcacacatttgatacaaagcattatttccagagactgaacctagaaagaattgcttaagactaggagtcttgttccagcctagatcccacactgttgaacatctatacttagtacatcacattatacatagcactgatatgacctgtgtgcatttaatttcctaatacttgttcatctctggcatagtttatatatatatatgtgtgtgtgtgtgtgtatatatatatatcatatgtaacatacgtgcatacaagtacacacatacacacaaaaggtatataagggtaggatagtataattgtgcagtaacgtttcttgtgaaagtggtggaaagcggattgcgttggcgacatgctggaatgtgcttccattggcagaagtaaggctttcaaaactagtcgttttcatttttctctagcaactgggaatattaataattgaagatgtgttggtataaaactaatcataataatcacaatgaagtggttttaataattataagatataatagacattacagatattataagatgtcaagaaaaagaagatgctataaaatctttgagatgattgacacgttaaatgcagcctcctgtgcctccctggggcgccactctcgctgggttcttggcggagctcaccgtactccacctgctcggcccaggctcctgcgcccccggagtcacgccatgggagcgaggaccttgccgcggccctagacaaggacaatgaggagggggtgcacgtggaatccccacggataggccggacgccgggcaggagcctttgcaggggtgcacagcctcctctggaagccctggtcgctgcctggtgcctgctgcgccctgcgagctccgcagcggtggagccaggcctgaactgcctgctcttggccccgcctgcggccctctgccctttgtcttgcccgtggggcccggggcctcaagctggcccggggttcctgaagttagctgacgatgggctggcctctggggctgggtcgtgggccttgtgcactggccgccacgtcaccagcgccaggcctacccgcggtgctgctggagacgcgggatgcccgggctcgggctctgctggatcccctggcgctgcgaaccccgtcaccttccatcgcggccggccaccatgctgcgtgctggtcagccgccttcctgggacccctccggccccaaggaggcatcactcacagccgcttgcgacaccggggccgcctgaacctcagccagggctgcgccacgcaagtggctccagccagccagccctggcccatgagcaggacgttccgatcctagagatgatcgccctcggcagtgatacacggctatggaggaggcagcggataccttctaaagtttgtagacactctactgccacaccaaaagtttcaccatcagctgcgatgccgactggggctcagagacccctctgggatgtggaccaggcagtgcctttgctgggcatggcagtgctgaccacccgaagtgcggaccttcacttcgtgttcctcatactccacgttccacatccaaagttctctaccatttctaagcaggagaaatcaaaagaaactgaaatcagaaagaaagagagagagagagagaaagccatgagcaaaaataaaaaaaagagcaaaaccttctggaaagcataaaacgcctcaaagccaaaaactaattcttatctcttttaaaccttctgcacttctccaatgatgaatgatttattttttttaacactggcaattcgtaattattaacttctctggcattaatgactagaaattgaatcacatgtgggagtttaatttgtattatatgaagcttttcatattttaaaaaataatcgttcagtttttctccgtggattaacaattaatggaaaattttcaacattgctgtgttaatgtctcctgaggtaattagatgtgaataatcttttataaacagaatttcctgggtgggatttctcatcttcaggagctcgataaataaccatgtcccaagagaactgtgaatttgggaactgcaagaactgagtctcaacttgtccagcctggaagctcttgggtgaatcactcttgcaggtgacttcactgccttctgttgaagggccagtgagagcctgggggtttcaacatgcaagagccttaccattttagggttaacattcacaatgaggaaaagacatacttttttgatattctccgtatgtaataaaatagttaccaaaacaaagcaaagtgtgagtggtgactattgagaggaccctttttatctttgctggattcccagagatttctgggtttcttttggagtcaatagtatttccatgttaattctgagctcttaaatcccacaatatgagttgcagccagtgactagagttgcagccagtgactagtgttgcagcttgttaaactgatcactagcggtagagccttttcattctgttcacttcttaaaaggtcagcttggtcagatatcagtgctaccctgccagaaataagcggttaggaatcaagtaaaggagtcagctaaaagtgtaattactaagtagtgaggtcacagctcgatggttgttgatctcattttctctctgctgctgatttcaaggctttataccgtgttttgatataacagaatgtatactatgaaggacaaatagtctgttagcttcttggagctatactccattactggagcaggggacaacaatttgaaggacattactacttagacagtttaatctgcctttggctagaataaacttcaagttccaagggctgggttcagttgttatgcaaatttagattgttgtggtaaaatttccaaaccagaaaggataggactctttagatgaaataagaatttaactgtatttgaaccctgttgaaggccagacaagtttaggcaaaatcccatgactgaatactctttgatgagtccctttaaattccaacatataatctatgttggtaaatatgatacatgcactggaaaaggatgtgtattcagtagttgttgagtgtcgggttctgtatatgtcagtttatgtcaagttcgttcattgtgttcatcaaatctccctttctcttatggattttttctgttggttccatcggtaattgaaaggtatgttaaaatctatattgtaattagtccatttttcttttagttatatcagtttctgtagtaaataatttgaagggatattttatatttatacatatttaacattggcatacttttctagtgactcacattgtaaaatctcttttatcttagcaatatttcttggcttaagactaaactgtcaataataacatagcaacacgagctttgtgctgattagtgttttcagacatgttttccactgttttacttccaaatgtctagattcttgtattcagataaattaattaaaacataaaaaataaatataatataaaacattaaaaagtaaatattctaaaaatccagccagagatgtttcacttttaattgaagtgtttaggaccactactctcacactgtgtgctaaggtgccctgagatgctgtgtttaactgacgggcaccagtggatagtgtgtgagtatgtgtatgtgtgcgtttgtatctgagatgggggtctcactctgtcccccaggctgaagtggagtgtgaggtctaggctcactgcagcctctgcctccctgagtagctgggacaacaggcatgcaccaccattcctggctaagttttgtaattttagtagagatggggttttgccatgttgcccaggctgtatatttttgagggaaacaaagcaacatttgctggagaccttaagaactactagcctgaggcagttcatagtttcaaaagtacttagttagaagtgcatttctttacctttagggtgggtgttgttaattaccacgaagaaagcaagtattgtgctaaagtcagtgtggaataagaataaggtccagtggttgagatccagtccgattttaagatttgaaaagttgtgctgtgtgcccaacaggcacacacatcccaatagtaagtaaattgtgcttttttaagaaaggaacaaaaatactgtttctacttccattgcgtgttattttgtatatgtacttgcaaatccatcaccaaaataaaaataaagaacatatccagcactcaaaaaagtttccccttgcccttttataatcccaaactttctgtatcttcctaccttaccacactccctggcaatcaccaatctgtcactataaaatagtttgccttgtgtagacatttatataaatgaagtgtagtatgcacccttttttggaggggtctggcatttttcacacagcataattattttgagattcagctatattgcaggcatcaataggtcattaattttatgactgagtagtattctattgtgcagatcggtcacaacttatatatccatttgcctgttgatgggtttttgcattgcttccggttttggacttatacaaatacatttgcaatgaacattcatgtacataagttcctataactttgagtaaatattaggagtgtaatagctaacaggtttaggtttagttttaagagactgtcaaaatgtttgccaaaatggttgtaccattttatatttttatcagcagtatataagaattccacactcttgccaacattttgtatgggccttcttttaaaattttaggcattttcatgtgtgtacaatagtattttattgtggttccataatgcctaataatatctagtatctatgtacttacatgccatctgtatatatttggtaaagtgtatgttcacatttttttgcttctcccttttttgttttattctttgcttattttctcattattaaattttaacagtttctttatatactttagattcaaatcccttattagatatgagacttgccagtattttccccttgagttttctttgtgttctcataacactatctttcagttagcagatgctctcaattttgatggggtcaaatttattaattgttgttttgcatttggtttttggggcttcatctaagatgtttttgattaattgaatattacaaattttctttattttcatctcaaagttcatagcttttaatactttattttatatttaagtcaatggtcctataagtgacagagctttaacccaagtcactgtcatgcatagctggacccaggggcttatataaaatcatcaagaaatgttttccttctttctcttgacacttttccttttgttttagcctcattttttccttctgaagatgactctcttctctctttgtagcaagagatagtactagaaataacccactttactttgtcctcacataccacagtggtagaaaaagcaagagtccttcctgatgattccaaaaaaatagtactgaaacagttgctatgatccaagggtagagtcttttgccagaacttggcatcatgatcacctctagggctggggcttttaggttgggtcaggcctagttggtgctcattgaaatggtccccaaagaaaaggggggctctcaagaggagagttgctgaacaccccaccaaaaaatagccactgtgtacatacctacaattccttgccagtttataagcaactggttgggtggaaaatgactagaaattcagttgtcattaactttcctttataatgtcagtagaatgagccatacatttcacatgttgtgggttacatccatgatagtcatttctgtatattaggtatcaatttggagtatcatctgaagaaatatattattttgtgatgttatccttaaattaatatttttaggataaagatttataggatgaaagaaaagtctaggatagaaataaaagaatagagaaaatgggagcatggatatactgcagaaaatggccaaacaggaaaagtacttgtgagaggtattgaagtacataattgatgtcacatagacctccaggaaattacaactactggcataagaacaaactatctgaatagtctttgctaatactgagtcttttctgcttgcaaaagtagtaagaatggtaaggaattgggacattgttcagataggcctcaatgcatttgttcatttacctgttgatggggtttgggggtattaatgaaggatgttaataaataataataggcatgttaggtaatcataattgatttgtccatttggtctgaagaaaatgttgcctaccttcttttttgtcgagggattcatttttaatgtcatgttggattatatgacttactaaatgtgtaattgcctatttatggattctgaagaattttataaaatgtatttgccaaacattttgaaagcttagaacttctccaaggaagaagttttttagtgctttagtgctgccctgataaatatggtagccacagccatgtgaatattgagcatttgaaatgtggctaggctggagtgagatgtgctgtcagggtaaaacacacaccagattttgaagacttagtaggaaataaaattaaacatatctaattaataacttttatattggttagacattgaaataatattttgtatgtattttacatataaatatacattcatgtgtatgtgtaattaatatcttcatatgaaatacttctcaattacaattggaagaatgatgactttgtggtggagaaatctggcacaaacttgatcatgtgcctcctgctgtgatgtcctaggaagaccacagcattatttctgtggttttcttgtgaaagatacatgacctaagtctggatgtggaaacacatcagatggaaaaaggtgaacacatccttcataagtgtgtatgctctttaaaactcttaaggttatgaaaaatagggcaaaacagaggaactgtttgaagttgaaggaacttaatagtcatgacaattaatgcaatgggaactcctggattggatcctggattacaaagttcaaaaaaatgtatttagggcacagctgagaaaatttggatctgttgattggacagtagtgttgggtgaatgctgatatcctgatgtggatgattatattctggttatgagaacttttcccagattcctcatcgtttgcccagtgggttcatggacaatgtggcgatggtagcaggagaagatgctacatgtttccaataacatgaatttccctgcagcagtgctgcctactgcccagatgagtgccctgactgccgacaatgagcaatgctgagaccctggaaagaggaactaccttgcctagaccagacagatttctggtaatgttgtaataatattttttcccttccttcatggaagtggtaaagaattgccctcactggaatagatgcatttccaaatacggactccacttcatatgcttctcatagcatcaaattatttacatttgctgagttcttattctctgctatcatacaattactactgatgatggagcttattttacaaaaaaagaagtgatgcgatgggcttcaacccatatttattggtcttgtgacatcccacatcacccagaggaatatgacctcacaagaatcagttatttcaccaactgtgagaccctgaggggctgggtttctatcctacaagatgtgttagatgccctgaccaaagatccctcctacccagaatgcatggttccatgtagcaaggatcattttgatggtggtgatgatgatagtgatggtaatgatgataatgatgacgattatgaggatggggagggtgacaataattattatggtgaggatggtgatggtgaaggtggcgataacgatagtgatagttatggtgaagatgctggtgttgatgatggtgagaatggcaagggtaagaatggtgatggccatgatgatagtgttggtgattgtaaggatggtgatggcaatcatggtgatgatgataatggtgctgactgggctatgaggtaatggaggcagaaaagtggctgtttctaggaagtatagagccagctgggaactgcaaggcaaccttagtgggggtggaagatgtcgggcccctgcgtcatttctagacatctggggaaatctcacccctcacagtagttccaggaagccctccatccagcatttccttctcgcaatcagcatggagcttttggggtgcagagaagtgtcttctattcactgcactctgtgggaagggaaaagggggagtgctatttatgaacccagtataatacagtagggtctcagagaagtcaggtaactttatcttcaatagcatccagttgtgatttattgagcaattactatgtgccaggcaacatgctgggtggttccttatatgttatctcatgaaatcctacagcaacacaaggagacaggcataactaccccattataaaaattgtggcaaaatgaactaaaatttactgtctaactatgtttaaatttacatttcagtggcattaaatacattcgcaatgttgtgcaaccaatttccagagtgcttttcatcttgtaaaactacagttctgtaacccatttaaaaacaactccccaatccccaccctccccaggacctggtagccaccattctcctgtctgtctctatggatttgactactctaggtgtcttggaaaagtggaataatacagcatttgtctttttggtctggcttattttgttcagcctaatgtcctcgggttcattcttgacgcagcacgtgtcagactctccttccttttcaaggctgaacactattccactgtatgcatagacagcattttgttgatccgtccatccatccattgacacttgggttccttccaccttttggttattgtgaatgatgctgctctgaacatggctttgcatgtatctcttccaggttagccccattatacagaagagcatagagagattctgggaggagggatgaatgcctggggcctttggtgaggtcctggtggaggatctcccagacctcaaaggcagagctcctctcctcaccccactgcctttcttaggacctgcctcctgctccaccacacagtgcccactccctggtactagacttgctaaggcctcttgatccctgaaagttcagggacaggaactagcaggcacaactacagtcactcacttctctgtcccctactgcagattcggttgcaaacaatacatgacaatgacctgctttccactctttcaccagatgtggatgaggcgcctactgcatgccaggcatgtgtgggcactggatggagacccctgggaaatgagaagatgtgagctcctcaaggccaggggtatccctttcacttgctgctaccctgtgagggatggaggggaaccctgaagcattggagaagtgcatgagtgacctagctcagatgatgatatcatagtaaccctgtttattatcacctaccatgtgccaggcattgtgcgaagtactttgcacacattaccggctgtaaagctcagagacaactgtaggagtgaatcttttatacctcccactttacagtggaggaaactgacgctcagagaggtgaaccagtcttccccaggccttgcagctagtctctgggatgtggatccaggcggtctgactcagagatcccctcatcctcttagtttttgcccctgcagccctctggcctgtccccagggccctgtaccgttggccacccccaagatgacctggacatgggctttagcaaaggcagcaaccccagcatatctccatttgatagggtggaacctcaggcccaccacaggagccctgggtaggctgcaggtggtgtaggtgctggctgaaccacaatgcacccatgttggaggatgcaccctaggattggcagcagcaggaggtctcccggcccaacaactggtagtggtacctgagaacaaaggaggagaaggatgcttcggatacgggtgtggagaagcccaaggaggaaaaagaagatttggactatgggctgctggatggcctcaaggaccccctcccagaaaaggaactttgagacttataccgagggctgagatgaaagtgctccctcttttctatcctggaactgctgcaaacttcagtgtgacatcacagcgccttgtttccctatttgtaaaatgggattttatgggggttccaatgagacactggaccgagagcattttgagaattgtaaaaaatgtacagtgagtgagggaataattattatcaatggaccattgctcttccaatagttagtattctttagcaaatatttaaaggtatttttaaaatatgttgaggaggtttgcagcagctgaggccctcaagagtcttttctgtctccgttgaaagctggcctctgacagggaccttcttggtgctacccctgggcccctcatcctttgtgcaggcttctcagggttcttatttatattgcatcttgtggttccctagtggatggcatgctgcatcttcactcagagctaactgcatctcctccaggcccatgtcccttgtgcagcacccactggtccctcaccaggattcaaaaccttctgtgactgacctctgctgacctcccaactttatcccccctcattctttctgctcctccagttccatgcctgtgcccctcaatcctgtggctcacactctcacccaagctgttctccatcaggatttccttggctcccttttctggtaggcaaatttattttcatccttccaagccctgcacagatgtcctctgtgcagaaagctctccctgaggtcacacagtccaggaacaaggtagttcttgctcctgtgctctctctgggttttgtgcctttatcactttggtgtaactgcctgcctcctgctgaagggaggcattttggctttactcacctcagtatctcctgggtccagctgggtgtctggcctggcccagaattggcgctcatcaagggtgtatagaactcacaaggacccaggaatgttttgcaaataataccaccctcccacacttctccaatgtttactttctaagatcctttactctttgacattcaaatttctaaatggcctgtatgtatttacaaagcctgggaaaatgccttcagaggacaaacaaaccccaccagcagaatgtatttgcattgactaggattatggatgaaattcagctttccggcaaatgaatcatttggcattggctaagtatctgctctgtgccagatactcagctgtgatctctagaaagagacatgaactactgacacagtacttgaccccgaagagctcagaatccagtgagcttgatttcttgtaagttagagacagagttcagagcagaagctcaggcaggagaagagaagtaaaatggacacaccagaggcagtgacagccacacagctgtctggggacactgagtgcagcaacaaatagcttaggctgccttggcagcccacgaaggtatcacggtttcctattgcagcatctcagtgatgcttttgttatgctgatctctgcaaagccctctgtgccccagcccaggatggtgacagccatgctgtggagaaaagggcagtgaccaggaccacaggctcagagcttgtaccctggaccacctgggaatgggagcccttcacatgttctctgcctctgtgttcaggttgggggtcctggccaaggaaaggagatgacccccatgctgggtcaaaagaacacactcccgggaacagactctctcttctttctgggtaatttctgcctctgcagtgaatggtgtaaccagacacatcctctctattggtatgacacaaagacaggcgttcctgctcatgggctgaatcctcaggtgaggggaggtgtagtacattcctgtgctctgctgactaaggcagggacacatgtcaccccatcagaatgagtgccagacaaatggctacaataaaatcatttccaataatcaaaggagtcaccttcattcatctacaaatacttttccttttctttttcttttttttttttttttttgagatggagtcttgctctgtcacctaggctggagtgcagtggcatgatcttggctcaccacaacctccgcctcctgggttcaagcgattctcctacctcagcctcctgagtagctgagactacaggagcccaccaccacatctggctaatttttgtatttttcatagccaggctggtcttgagttcctgaccttgtgatccacccgccttggcctcctaaagtgctgggattacaggtgtgagccaccacacctggcccaagtttttttctataaaaccacctattgcactcagggtagggtaaatgatgcatcatgcctgctggcaacttgggccctatctggaaagcgagtgcccaccaccatggcacagtgctgtgcagtgcctgtgtggtgctgaatctcaggagcagcccctatcctgtgaaccacaactacagggaacttagacgtaagcaaagacctctggtggccaagcctgccagaaagcagatgctaaccctgtcctggggatctgcagggaggtcgggccagtggagaggtggcgagaccaatgtgtggtctccccaactcccgcccatgctatgcaatgggggcgaccacacacccgatctgcctgggagggtcctggtgtgcccactgcctcgctgagttatgaggggtgctgcctctcacatctcaccggtatcgcatttgaaggacaaattatgtcttcccttccccaccctgtggacctccgtttcctcatgtgcaagtgggggatgatatgtttacatggttatgcagtggtggtatcgatgggatccatctgtcaataccctgcatccagcgaccatctggagcacacctgcagttcgcaagctgggcttcctgctgcagtgaggggagcaagcactgcctggagccagggagcctctctgaaggaggtgttggaaaggacttgttcctgaatttgggcttgtattgggagcttgggggagggttgaaagaagcctttgctctagattgcttgctgactgtatcatggtgtggcttcatttctcagagaagagccgtgaaaatatacaagcatcttctctggcgtggatccactgctctcctgtgggacaaagagttcctctggggctcttgtccttggctgcagtgtgttcatcttgatcctagaaaagaggccgctcaggatggggatgagatttcagttgctccgggagcgacgcatctcctcacgtgggccaggctttcacacacccaaagcggatctgccgcggcgaaaacgattgacagccggcctcatgacccaggcagagatggagaaagaggctcaccaaagacaggccgccatgcgacaaaccgctttgtggcgcacagggcacatttggccaaagacacacatgaacacgggcatacacacacaaacccacagagagagggaaagaaacacacagagactgagagacagagagaggagagaatgggagagacacacacacacacacacactcacacagagacacacacacagagtcatacagcagaggcattgaaacacacaccaccggcaacccctgaggctgcggggttctgctcacgacgagaacgaccctcaggtgagagagcagcccaggggcacgcaggccaacctgtcctcgagatcacggatggcggcacgacttttggggagactcaccccaaccaacaccatccgggcaggcctgaggctgggatcccgtgctgcttcccccgtccccgcctggggtttcctcatggtggtcggccctttgcgactcctggcatctggagaagttcccgtcgcccccgtggagaggtcaggccggagcctcggagccccgacacacaagcactgccacggagggcttctgctttgccaagcctcggggactggtttctaagacaactgtgggaaccactgtgatgggggaagccgctcacgcctcgcgcatgcgcattggctgggccgactcgcgctccgctcctggcagtcgggctgcatcccctttattttttttttattttttatttttttttttcatctttgccctactgtttttattttataaagttctcaaatcaaaatacaaaatgaaaccagaaaaccctacaaagtaaaaatgacaaaatgtgaacatctgtttattctggttgatgggttattacattattctgcttttctatattttctagactttttattttactttttttttttattgatcattcttgggtgtttctcgcagagggggatttggcagggtcataggacaatagtggagggaaggtcagcagataaacaagtgaacaaaggtctctggttttcctaggcagaggaccctgcggccttccgcagtgtttgtgtccctgggtacttgagattagggagtggtgatgactcttaacgagcatgttgccttcaagcatctgtttaacaaagcacatcttgcaccgcccttaacccatttaaccctgagtggacacagcacatgtttcagagagcacagggttgggggtaatgtcatagatcaacaggatcccaaggcagaagaatttttcttagtacagaacaaaatgaaaagtctcccatgtctacttctttctacacagacacagcagccatccgatttctcaatcttttccccacctttcccccttttctattccacaaaaccgcgattgtcatcatggcccgttctcaatgagctgttgggtaacctcccagacggggttgtggccggacagaggggctcctcacttcccagtaggggcggctgggcagagtcgcccctcacctcccggatggggtggctggccgggcaggggctgacccctcacctccctcccggacggggcagctggccgggcgggtctgaccccccacctccctcccggacggggcggctgccgggcggagaagctcctcacttcccagacagggtggctgccgggcagaggcgctcctcacatcccagacggggcggtggagcagaggcactccccacatctcagatgatgggcggccgggcagagacactcctcacttcctagatgggatggcggccgggaagaggcgctcctcacttcctagacgggatggcgccgggcagagacgctcctcactttccagactgggcagccaggcagaggggctcctcacatcccagatgatgggcagccaggcagagacgctcctcacttcccagatggggtggcggccgggcagaggctgcaatctcggcactttgggaggccaaggcaggcggctgggaggtggttgtagcgagccgagatcacgccactgcactccagcctgggcaccattgagcactgagtgaacgagactccgtctgcaatcctggcacctcgggaggccgaggctggcggatcactcgtggctagaagctggagaccagcccggccaacacagcgaaaccccgtctccagcaaaaaaatatgaaaaccagtcaggcgtggcagcgcgcgcctgcaatcacaggcacttggcaggctgaggcaggagaatcaggcagggaggttgcagtgagccgagatggcagcagtacagtccagcttcggctcggcatcagagggagaccgtggaaagagagggagagggagaccgtggggaaagagggagagggagagggagagggagagggagagggagagggagagggcaggtgtttttcattcattcctctgaagcacatggtgttttcatttctaatttgtggaagaatttagtgcaaaacttggagcacaattattagggccaatgacaacccacatatgtggaattttgaggacttttgcagattttatggatttggtgcagttccacagcaaactataaaattattattgcagactaaaagattgtaaaagttaaaacacaaactatctgaattacagcgcccagcaaaacgtgcaagaaacagttaagtcatcacgcacatccctatcatttggtattctaatgcttcgtttagctaaatattttttatcagctttttgtcttaataatttctggaaataggatgataattttgttttcacagttggtgattgtatatggacagaaggtatgaaagaggatgagatttctaactttcagataaaaagtttggcatattctattagttccacctcattaattttattacttatttttttcagttcttattttgtttcatttttgaatatggtatctgctgtatgttgataatggtgagttaaaaatttatcagctgcagccatacatctgtctgttttttgttttatatatatacactttggggcttttttatttggtatattaaagtttattcatgtcatatctttattattagcttaccaatttaacataatacaatgctcttttaactcaataagagactttaaatactacatagcctgcaattatattaccaaatctgcttttcttttgtatatatttaattagttacaatgtacccaatccttaatttatgcccctctaatccagctttcggttgtttctaggcagcaacatcttgtaacattgtgttgttggattttgttttaattcaacttaagacacggtaaacatagatagtggaatttaagcccttaacacccaataccaatttattttgaactgtttaaactcacgatcctctacttcttttccttgcttatggctttgtagaggccggcgtgcagcactaagagggtaaggaacgcagtgggaaatctctgagccccatttagggttgtcgcaaatagaaagaggccaggtcctcttgcttactttgttggtggggttccctcgcacactcatgccttcttgaatgctcatattcatgcactttcacactcacttccccacgttcacgcctcacacagtagtgtatataacattttctggttttacagtgtttaaaacttagcctttaggggtgactgatgcttttctgggtaaaatgctgagcactgtgaagggactgcatgagatcaaaagatcccccatcctgggagaagttctggctgatttgggagctgatccctggagaagttctggttgatttgggagctgatctttggagaagttctggttgatttgggagctgatcctgggagaagttctggctgatttgggggctgatccttggagaagttctggttgatttgggggctgaaccttggagaagttctggtagatttgggagctgaaccttggagaagttctggttgatttgggagctgaaccttggagaagttttggttgatttgggagctgatccttggagaagttttggttgatttgggggctgatgcttggagaagttctggttgatttgggagctgatccttggagaagttctggttgatttgggagctgatccttggagaagttctggttgacttgggggctgaacctttgagaagttctggttgatttgggagctgatccttggagaagttttggttgatttgggagctgatccttggagaagttctggctgatttgggagctgaaccttggagaagttctgactgatccttggtgagcatcatgcactcctgggttttatcctctgcgcattagagaggtcaggccatgaatggtcctagatcaagatgagcactgaacttggttattttcttcctgactttcataaccaacaatcagtgcattatcgttatcttctactccatggatttaaacatcttgtttctgtataacaaaccaaactgtgtacttttcacactacatgtgatttaaaaataatgttcctaagttttcagggggtgtctgttcatcctcctgctgttcgtaattatgccaacagtagtagctaccactgattgcatttctttactgttctgaccctcactatgtacccacagcaccttaccccagcccctgcctaaggcacgggtgttatttctagttgatagatgcggaacccgaggctcctgtagcgaatgagcatcagagcacatatttaacccagcttttggctctagaagtcctcgttctttgtttttcaaggaaggtgccatctgggacactgtctttcatgcaccaggttggagaatggcatgagttagggaatcagcctttttgggaaggcagaagcttgcagaacccaggaggagaaaagcccagtgtccctcatcctctcatctttgccatagagaaaacatgaggaccaagatgtttttctgaccagtagcatggacttgcattccactggggccactctgacttttacaaagggcaagcctgaaagcaaacttgtcgatgttgaatgagatttcctcagtaccaagcagtctgcatgtggtgtagctgtttatgaattgcctgggaacaggaactgcccagaacctgggtatcctgggacctgtggggaaaaggggctatgaggatatcagtgctacaggtcgcttagtgtcacatggtccctatttccagggacccagtgttgaggattctcagtgagcatgtgtttcaggcaagtcagagcgagcgtctggagccactttgcgacaatccacttattgctccttctacaatccagcactgttctcatgttgtttggtaaattttgttttttaatatctcagctggagaatgtgtgttttgtggaagaaatgaccaactagtagaatgccttccatttgtaataaaatccttgctgggtttgagttaataggcctccaaggaagagcaagttaaaatagaactggacagagtgctaaataaaatactgtccagcataatctactgccctcaagggagagagccaaatgactcaatacgggttttccatcttcaatttcaatagcccgatgtcaggatcaagcagcagaacatgctgactacctcagtatgctccctgcattcaaagtttcttttcccatggcctcttctgctcctgtgatgccatccccaagatgcttaaagtgcacagacatgaaagtccttttactagcattgcagatcgaggggtaggtagtgacgttctaaaggaacgaaacagaatgtggaccacagagagatcggcaattaacactgccacctgttttagtcatttgtttgttttaattgggaggtttatatatggttataatctgtcatttgtattaatgtagctatctgtggggatggggaaaagaaagaatagaattagttattcattcatttatttatttatgtatttattttttaatgattttgagacaggcctggctctgttgcccaggctggagtgcagtggtgcgatcttggctcactgcaacctccacctcctaggctcaagccatcttcccacctcagcttcttgtgcagctgggactacaggtgcatgccacaacaccaagctaatttttgtatcttttatagagatgggatctcactgtgttgcataggctgatctcgaactcctgagcttaagggatccacccgcattggccgagtactaggattacaggcatgagccaccgtgcccagccttgaagttttttagttcaatgatcttggcattttcaagatttgctatgtaatgactgctccatacccctttcctatccatgggagttcagtttcaaatgcactgagcattcaaagtaagtcatcctggaaacagcatgtctggtgatttcctagttgggaaaatcttctgtttagctgagagggaaattgctatggtttgagaagagacattctatggtgaaatttaggggagaaatatattatctttacaggcgtcctggatacaaaaccaaactgcgctgcgctctacatgaagaactaattttattgtggggttttttttgtttttttttattttcagaaagtctgaggctgatatgaatggagtagagaaagagggaaggatggtaggaaaacacacctcattttccagccagtggccatagccagcctcatccccaagaagcctaaacattttatacttgtgtgagtcttcatatgagcacattcacttcactagggctgcagcgtcctggagagatgaatggtttccattcacagatgacaaccctgatggcccatactcagtgacagggatggtccacagctgacaaacctggtggcccatacttagtgacagggatggtccacagctgacaacactagtggcctatactcagtgatgaggatggtccacaactgacaaccctggtggtccatactcagtgacagggatggaagtccttctccatttgccgtttattagagagatatatcaggctcattgtgtggaaggaaacattttccaatgtactccacatgcactctgtgatgctcattgtcctctgacatgtaattaaacactgacacttttctcctagctttcctaaatggctaatgacagaggggtggtaccagctgccccagggtaaactactgagcaaatctaaaggtgtgtcttctagttccatcttctgttagaaaaaccaaatgctcacaaaatgcaataacagtttaaaccacaactgctctctcacaatgtttttcatcaatcattataataatattgtttttaaaataaactttgttttaggagatttgcatatctacagaaacattgtgaacttagagtagacagagttcacatccactcccggctgtgtttatcattaacgtcttacaatattatatatattatattagtgcatttattattattcatgtaccaatattgatatatttttattacttaaagcctatattttacttatatttatgtggtttacactgagtgtccttttctgttctgggatctcattcaggatcccaagaaacatttagctgtcaagtctcctgaggctcctctggctgaggcagttgctgggacattttctgctttgtatgaccttgcaggtttggaagagcaccaatcaggggtacagtaggatgccccatactgaaatctttatgttgttattctcatgattagactggggtcatggcttttagggaggagaaccacagaggtaaggtgccatcgtcatcacatcatctgaagggtacatactgtcaacatgactaatcactatggtgaccttgttcaccttgccaaggtggtgtttgttaggttttctctttccatagtgcactctttagaaggaggctactttgtgcagcccacacttaatgagtgagaagttttgctccacctcctgagggtggagtatccagacaaattatttagaattcttatgcataatttgtctcatatctcccatttaaatatttactcaattatctattagtaccagtatggactcatggatatttatttggtactttgagttaaaattatatattattctatttattttattgctcaaatttttccagttcaaaaattacccactacaatagttatgtagtggtactttgttgtcattttaagttgcaattctctgttgacaaacaatattgagcattttttcatatccttatttggcatctgtttaccttctttggtgaggggtctgttcaggtttttttacattatttaactgggttgcttgttttcttattgttgaattttaagagttctttgtacattttagatacacattttttatcagatatgcattttgaaaatattttctacaagtctgtggcttgtctatgatacttttaaaaatctattttcacactctaatgagacatatgaagaggaaagaagttagttaattataggagaccaatcatgtctctacatgggggtgtgtgaagcctcctccctggaggaatctacttttccttggtcttccaaatacattgttatttccaaaaccatatatgaggagtataaaaaagatatgagaatatatcaatactcaaataaagagaaagtgtacttaaaaaaagaattctcacaatgaccagtgaggtagataaaacagacatacataagcgttcacgtttatcagatgcagaaactgaagcccaggtaagccatatgacccagctagagtcactcagtcggcaagagatggagccatgactacactcctagattctatctcctggccccaaattcacttaccttcatcacactagaaccatatcatgttagccaacagaccatcagtgtgtttgtttaaagtgctaacttactgataattcatgcatttaacagtgtatttttcagatgcatttgacccttgctgtgtcagataagtcacttattcaaaatggaataagttaagatgtagcatgagcctaaccatgtctttgctttcttggcactgtaaagctacagtggatcctaagtattctatcatctgattcttccagacaattctttattgtactcaacattttagtggcagtagtccttggaatttgctaatcattttccttaagagttttggaggaaaatatctgttacttagccagctagccaattagaaaattaaaagtccctttagatcataatttaccagtcttgagactactggcttttgggctggataattctttggtgtggtgggctctgatatattataagatgcttagcagcattccaggactgtccctgctagatgccagtagtatccctccaggatgccacaaccataaatgtctctagagattgacaagtgtcccttgggggctctattggtccattttcacactgctgataaagatatacctgagactgggaagaaaaataagtttaatggactcccaattccatgtggcttgggaggtctcacaatcatggcagaaggaaacagacacttcttacatggcagcagcaagagacaatgagaactgactgaaagcggtttccccttataaaaccatcatatctcgtaagacttactgtcacaagagcagcacaggaaatacgtgcccccatgattcagttaccccccacttggtccctcccacaacacggaattgtggcagctacaattcaagatgagatttctgtggggacacagccaaaacatatcattctgtccctggcccctcccaaatctcatgtcctcaaatttcaaaaccaatcatgccttcccagtagaaccccaaattgttaacccatttcagcattaattcaaaagtttacagtccaatgtctcatctgagacgaggcaagtcccctctgtctgtgagcccataaaatcaaaagcaagttaattactttctagatacaatgtaggtacatgtattgggtaaatacagctgttacaaatgggagaaattggccaaaacaaaggggctacaggccccatgcaagtccaaaatgcagcagggaagtcaaattttaaagctccaaaatgatatcttttgactccatgtctcacatctgggtcatgctgatgcaagagatgggttcccgtggtctcaggcagctctgcccctgtggctttggaggatactgcctccctcccagctgctttcatgggctggtattgagtgtctgtggcttttccaggtgcattgtgcaagctgtcagtggatctaccattctggggtctggaggatggtggctctcttcttacagcttcactaggcagcaccctagtggggagtctgtggggatccccaccctacatttctcttcttcactgccctggtagaggttctccatgagggccccactgctgcagcaaacttttgcctggacatccagatgtttccataatatcttctgaaaaactaggcagaggttcccaaacctcaattcttgactcctgtgcacctgcaggctcaacaccacatggaagctgccaaggcttggaacttgcaccttctgaagccatggcccaagctgtaccttggctccttttagtcatggatggagcaactggaacacagtccttagactgcacacagcagagagactctggtcccggccaatgacaccatttcttcctcctaggcctctgggcctgtggtgggaggagctaccacgaaggtctctgacatgccctggagacattttccccattgtcttggtgattaacattcagctcctcattaattatgcaaatttctgcagccagcttgaatttctccttagaaaatgggattttattttctatcacattgtcaggctgcaaatttgtcaaacttttatgctctgtttcccttttaaaactgaacacctttaacagcacccaagtcacaccttgaatgctttgctgtttagaaatttcttctgccaaataccctaaatcatctctctcaaattcaaagttccacaaatctctaggtcaggggcaaaatgctgccagtatctttgctaaaatatagcaagagtcacctttgctccagttcccaacaaattcctcctctccatctgagaccacctcagcccggatttcattgcccatatcattatcagcattttgctcaaagccatttaaaaagtctctactagggagttccaaatattcccacatttcctgtcttcttctgagccctccaaacagtttcaacctatgcctgttagccagttccaaagttgctttcacattttttggtatcttttcagcaatgccccagtccactggtaccaatttactgtattagttcattttcacactgctgataaagacatacctgagactggagagaaaataggtttaataaactcacagttccatgtggctagggaggcctcacaatcatggtggaaggcgaaaagtacttcttacatggcagcagtaagagagaatgggaactaagtgaaaagagttctcccttacaaaacctttatgtctcatgagacttattaattatcatgagaagatcatgggaaaagcctttccccatgattcaattacctcctactggatccctcccacaacatgtgggaattgtggaagctacaattcaagataagatttgcatgggggcacagccaatccatatcggggcaaagtcccctctgtcaagaaccactactctagtgtttaaactgtttgatgactaaagattgcagcagcagtagattataatatgttaatttcaagaagctgtagactttataagtataatttattgttttgtatttttattactttatttatatcataatttgatcaagcaaaacaaatttaaattttcatttcaaaattgataataaaatggaaggaataggattaaatgacaggaaggatagaaaaggcaaaatggaggtcaactagggcttaaatttatttttggcaaaatgaaacaattttctgattcaaagaaatgtccctcatgggaacatcttttgccttttgtcttttcattatagaatcatagaatcttagagccagttgggcccacagagattaccaggtgagtgctagagaaagaagggtaaagcattggtgataggttcatgttccttcttactgcagcctgttagtctgagtgctataatacatatgacttaattatggaaaatctatagttaattatagcattaattatagcatagaaataatctgaaaattggccgggcgcggtggctcatgcctgtaatcccagcactttgggaggccaagacgggtggatcacaaggtcaggagatggagaccatcctggctaacacagtgaaactccatctctactaaaaatacaaaaaaaaaaaaaaaattagccgggcgttgtggcgggtgtctgtagtcccagctactcaggaggctgaggcaggagaaaggcatgaacctagggggcagagcttgcagtgagcggagatcatgccactgcactctggcctgggtgaaagagcgagactccatctcaaaaaaaaaaaaagaaaagaaagaatctgaaattatacatagcaacacatggaagttgatttgaaaagttgtccgttttgaactaggactccctggagaactggctgactcaagggctagggaagggaaaatgcatgatgaacctggaggaccttgtgttgccagaaagtaaggggtcagggaacaggcctgacaaagcaacatgcagccaacctgaaagagctcccagtggccaaagctggaaaactttgaacaacaaaattaataaaaatactactgagttataacccaaagaaaaaagtaaatatctgtgagtttatactgataaaaataaatggttaaatacataataactgaagaagtgaaaaaaatcttccttgtggaagatttccaaatagtaaacataaaagaaaggagggaaatggaagacaccacttgatgtggtttggctgtgtccccactcaaatcttgtcttgaattgtagctcccataatccccacctggcctgggaggtacccagtgggaggtaattgaatcatggctctgattttttcccatgctgttctggtgatagtgaataaatctcatgagatctgatggtttataaagggcagttcccctccacatgctctcttgcttaccaccatacaagatgtgcctttgctctatctttgccttccaccatgattgtgaggcctccccagtcctgtggaactgtgagtccattaaacatctttttctttataaattacccagtctcccatatgtctttgttagcagtgtaagaatggactaatacaccactagaataccacagtaatagtcgccataggaaagattcatggatgactgctgaaattagtgtctgaaacataaggaagaaacaggatatttgaataacctcaaatatctgtggccaaagatttattaattactgtactgaatttaacatatatccacaaattctttcatagtttttcctccagcaggtggagtttaatttccctccttatgaaagtaagctggatttagtgccttgcttgtaataaatagagttttggaaaagtaaaaatagtgaccctacagtgaaaaaatctgaaagatttggccttatccaagtgatggaggtgagcatcaccagtgataagtagtgttgatgtcaagcatccctggaaatgatgcaatgagaaggacatcaccactgtgttaccttacccccaaatccagaatgccagtgcaatctatagaaaaaatccgcaattgaggagcattctacaaaatacctgactaatactcttcaaaagtgtcaagttcatgagtaacaagggaagacagtgacgctgtcacggattggcagagactaagaagacataacagatgaatgcaacgtggtattctggattggatccttgaataggaaaagggcattattggaaaaactgtcaaaaagccaaataaagtccatagtttagtcaatagtgtagcaatgttgatttcttagttttgataaatgtgtcatggttatataacacgctaaaattaggggagactgggtggaaggctcactggaaccctttatactatccttacaacttttctataaatcttagtatttcaaagttaagtaaaagtgaaaaattgtgaagtcccttctttcttaaaacaaatctaggatgcttgttatgtgttaacaattcttgtaaatgcaaatcactttggagaacaataaatattacccagaaaaactgaccactttcaatccccatgacctagcaattttattgattgtatgtttttaaaaatgtgcctgtgcccaatatcactaattaatagggatgcatatcgaaaccgcaacaatgtaccacttcccagccgttagtttggctactactagaaaacaaaaacaaaaacagatatttgaacgcttgacactgctggtgggaatgtaaaatggtacagtaacaatggaaaacagtttggaggttcttcaagaaattgaaaatagatatatcttgtcattcagcattttcacttctggggatatatccaaaagaattgaaagtagggacctaaacaaatgtgtgtatacgcatgtccatagcagcattacttgcatcagctaaaacatggaagcaacccaaagatccatcagtggaagaatagataagcaaaatgtgctacatacatacaatgaaatattaatcagcattaagaggcaatgaaattctgagacatactacaacatggataaaccttgaagattttatgctaagtgaaataagtcagtcacaaaatgacaaatattctgtgattcccctcatacaatatacttagtaagactcatggggacagaaagaagaatgatggttgctaggggctgggggaaggcagaatggagagttattgtttgaaaggtacagaggttttttttttttaattattattatttcaatagttttgagaaagcaggtggtgtttggttacatggataagttcttgagtggtgattatgagattttggtgcacccatcacccaagcagtgtacactgtacccaatgtacagccttttgtcccttatcacccacttctcctcaagtcccagagtccattatgtcattcttacgcctttgcgtccccatagcatagcttccacttaaaagtcagaacatacgatgtttggttttccattcctgagttacatcagttagaatagtgatctccaactccatcaaggttgctgcaaataccattatttcattcatttttatggctgagtaatgttccatggtatatatatacaccacattttctttatccactattgattgatgggcatttggtctggctccttatttttgcaactgttaaattgtgctgctataaatgtgtgtgccagtgtctttttcatataatgacttcttttcctctgggtagatactcacaagtgggattgctggatcaaacggaagttccacttttagttctttaaggaatttccatactgtttttcatagtggttatactagcttatgtttctacaagcagtgtaaaagtgttcccttttcacaacatccataccaatgtctataattttttgatttttaaaattatggccatttttgcaggagaaaggtggtattgcattgtggttttgatttgcatttccatgataattagtgatgttgtgcatttctttatatgtttgatggccattagtatatcttcttttgaaaattgtctgttcatggccttagctcactttttgatgtgtttgtttttatcttgttgatttgtttgagtttcttgtagattatgaatattagtcctctattggatacatagtttgtagtttgcgaatcttttctcccactctgtgcattgtctgtttactatgatgattatttcttttgatttgcagaaggtttttactttaattaagtctcattggtttatctttgtttttgttgcatttgcttttgagttcttgatcattaactttttgcctaggccaatgtctagaagagtttttccagtgttatcttctagaatttttatggtttcaggtcttagatttaagtctttgatacattttgagttgattttgtataaggtgagagatgaggatttagtttcatttctgtacatgtggcttgccaattatcccagcagcatgtgttaataggggatcctttctccattttatgttttgtttgctttgtggaagatcagttgatcataagtatttggctttatttctgggttctctattctgttttattggtctatgtgcttattttttcatcagttctatgctgttttggtagctatagccttgtagtatagcttgaagtgagataacgtgatgcctccagattcgttctttttgcttatttaatcttgctttggctatatgggctcttttttggttccatatgaattttaggattgttttttctagttctgtgaaaaatgatgatggtattttgatgggaattgcattgaatttataaattgctttcagcagaattatccttttcacaatattgattctacccaaccacgagcataggatgtgtttccatttgtttgtgttgtctgtgatttctttcagcagtgttttgtagttttccttgcagagatttttcacatttttgttgggtatattcttaagtattttacttttttgtagctgttgtaaaagacattgagttctttatttgattctaagcttggtcattgttggtgtatagcagtgctactgatttgtgtacattaattttgtacctgaaactttactgaattcatttattagatctatgagcttttgggatgagtctttagggttttctaagtataccatcatgtcagtggcattagcaacagtttgacttcctcattactgatttggatgccttttgtttacttctcttgtctaattgctccggctaagactttcagtactatgttgaatacaagtggtgaaagtgggcatccttgttttgttccattgatcagagaaaattctttgagcttttcccattcagtatgatgttggctgtggatttgtcataaatgacttttattaccttaaggtatgtccctctatgctgttttgctgagggttttaatcataaagggatgctggatttcatcaaatgctttttctgcatctattgaggtgatcatatgatttttgattttacttctgtttatgtgctgtatcacatttgttgacttgcatatgttaaaccatccctgtatccctgttataaaacacacttgatcatggtggattatcttcttgatatgctgttgaattgagttagatagtattttgtggaggattttcacatctatgttcatcggggatattggtttgtagttttctttttttttgttatatcttttcctggttttggtattagggtaatgctggcttcatagaatgatttagagaggattccctctttctctatcttttggaatagtttcagtaggattggtaccaattcttctttgaatgtctgatagaatccagctgctcctggacttgttgttgctggcagttttttttattgctgttttaatcttgctacttgttattggtctgttcagagtttctatttttttctggtttaatctaggaggattatgtatttccaataatttatccaaatcttttaggttttctagtttgtggacataaaggtgttcatagtagccttgaatgatcttttgtatttctgtggtattagttgtaacatctcccatttcatttctaattgagtttacttggatctcctctctttttctcttggctaatcttgctaatagtctctcacttttgtttatgcaaaaagaactagctttttgcttcatttatcttttgtattgtttttgtttgcttgtttcaattttatttagttctactgtgatcctggttatttctttttttctgctgggtttgggtttggtttgttctggcttctctagttccttgaggtgtgaccttgggttgtttatttgtgctctttcagactttttgatgtaggcattcaatgctatgaactttcctcttagcaccacttttgctgtgtcccagagattttgattggctgtgtcactattattgttcagttcaaatatattttttaatttccatttttattttatttaaccccaggatcattcagtaacagattattcagtttccatgtatttgtatagttttgatggttcctttgacagttaatttgtaattttattccactgtggtctgagagagagtattttacataatttcaattttcttaaattaattgagacatggtttttttttttttttttttttagatggagtctcactcttgttgcccaggctggagtgcagtggcatgatctcagctcactgaaacttcctcctcccaggttcaagtgattcttctgcctcaccttccctagtagctgggactacaggtgcatgccactatgcccaactaattgtttttgtatttttagtagagacacggttttgccatgttagccaggctggtctcaaactcttgacctcaggtgatctgtctgccttggtctcccaaagtgctgggattacaggtgtgagccaccacacccggccgagacacattttgtggcctattatatagtctattttggagaatgttccatgtgctgaggagaagaacatatattcagcagttgtcggatagaatgttctgtaaacatctgttaagtccatttgttctagggtgtagtttcccactgtttctttgttgacctgtatttatgacctttctagtggtcagtggagtactgaagtgcccactattatagtgttgctgtctatctaatttcttaggtctcatgataattgttctataaattttggagctccagtgttaggtgcatatatatttaggattgtgatttttttcctgttggacgagttttttgatcactatttaactgttgctgatttaaagtattttctgtctgatacaagaatggatacttctactcacttttggtatccatttgtgtggaatatctttttccacttggttactttaggtttaggtgaagccttatgtgttaggtgcatctcttaaagacagcagatacttgattggtggatttttattcattctgccattctgtatcttttttttttttttttaagatggagtctcgctcggtcaccaggctggagtgcagtggtgtgatcttggctcactgcaacctccacctcccgagttcaagtgattctcctgcctcaatgtcccgagtagctgggactactggcttgtaccaccgtgcttagctaatttttgtgtttttagtagagacgaggtttcacaatgttggccaggatggtctaggtctcttgatctcgtgatctgcccacctctgccttccaaagtgctgggattacaggtgttagccaccattcccagccctgtatctcttaagtgaagcatttaatccatttacgttcaacattaatattgagatgtgaggtactgttctattcatcatgctagttgtagtctcaatacgttgttttttaaattgtgttattgttttatagatcctgtgagatttatgctttaaagaggttctattttggtgtattttaggtttcatttcaagatttaagactccttttagcattttttgcagtgctggcttggtagtaacaaattctctcaacatttgtttttttgaaaaatactttttctctccttcatttatgaagcttagtttcactagatataaaattcttgactgttattgttttgtttaagggagctaaatataggaccccatcccttctgtcctgtagggtttctgctgagaaatctgttgtcaatctgatagctttttctttataggttacctgctgcttttgcctcacagctcttaagattatttctttcatcttaactttagataacctgatggctatgtgcataggtgatgatctttttgtgatgaattttccaggtgttctttgagcttcttgtatttggatgtctagatctttagcaaggccagggaagttttccctgagtattccctcaaataagttttccaaacatttagatttcttttcttcctcaggaatgccaattattcttatgcttggttatttaacaaaaccccaaatttcttggagtctgttaattttttaaaattcttttttctttgtctttttttttcagttaatttgaaagccttgtcattgagctctgaagttctttattctacttgttttattctattgttgaaacttttcagtttattttgtatttttctaagtgtgtctttcatttccagaaattgtgattgtctttgctttatgatacatgtttctctggagactttttcatccatatactgtattgttttcaaaatttcttgaagttggttttcaccttattctggtgcctccttgaatagcttaataaccaaccttccaatttttttttttttttttttttttttggcaattcagagatttcttcttggtttggtaccacagctggagagctagtgtgatcttttgggggtactatacaacttgttttgtcatattaccagaattacttttttggtttcttttcatttgggtagactgtttcagtggaaagatctggacctcaagggctgctattcagattctcttgtcccacatggtggtgctctcttgatgtgtgccctcccccttcctctagggatagggcttcttgagagccagattgcagtgattgctaatgcccttctgggactagacacccagtggggctactgggctccaggctggtgctgcagaatgtctgcaaaaagtcctgtgctgtgatttgtcttcaggtctcccaattctggataacagcccctgctctggtggaggtggcaggggagtgaagtgaactctgggattttttggttgttgtaatgtgatggttttctcaaatgctggttatgctagcagtgaaattttcacagggacagactcaggacctctggttagccaggatgttgcaggcagtggaattagctgttgttttctccttctatgaagcagggttgttctcttatgagttgctgtaatggcttgagttggttggccccagccaggaggtggcactctcaagagagcacaagctacagttgtagaagggggctaccaccttgccctatgttggccaggataagtactcgggtttctcaggtgatgggcagggacatagagctcccaagagtttatgtcttttgtcttcggctaccagggcaggtagagaaaaactttcaaagggtctgtgaattctttcagtctccctagtatgtccttggaacagaagttcacaatgtgaatctccagacgctgatctgtttgtctaaatgggagctgcatgttagtcctgtctcctctctggtgttttttctctcctacctgaaaggtacggagtttcagtgtgggatgatggaaagtgctggagtggatattggtgatgtctgcacaacaatgggaatgaatttaatgccactgagttgtacatttgaaaatcattgaaatggcacattttagttatgtatatcttaccacaataaaacatcagttaaaagaattttatttatagaccaaatatgtctgtgctctatttataactcctagtatgttaggaatcaccccaagtacatgttcctaggattaatgctttctaaaataatcctgtggtctggtacgtattctcaaggaagggattcctgttgaacccagcttgaggaattctttgctgtctactgctcagtgtctgttgactggaacgctggagatgatgcagcacacattggcccctgtggtgctcacatgatttccatgtgctttcctcgggtgggatgcagcatgggagtgccggggtgtggagtgcagcgtgtgagtgccggggtgtggggtgcagcgtgggagtgccggggtgtggggtgcagcgtgggagtgccggggtgtggagtgcagcgtgggagtgccggggtgtgggatgcagcgtgtgagtgccggggtgtggagtgcagcgtgggagtgccggggtgtggggtgcagcgtgtgagtgccggggtgtggggtgcagcgtgtgagtgccggggtgtggggtgcagcgtgggagtgccggggtgtggggtgcagcgtgtgagtgccggggtgtggggtgcagcgtgggagtgccggggtgtggggtgcagcgtgggagtgccggggtgtggaggagcagctggtgtttcacgttgctgaactaaaaccttggttgcactcagcattcagattctggggacactgtggtgacctgacacagggtagcatagagacggcattgccctcagcctgctagcagcaggagggtcggggtccatcctcagcatgtgcgggctgcccctcgtccgcagcgggaatcaaactgacgctgcatatctcttaacagtttcagattttgcctcgtcccatgtttggatgtgatgatttgggttggctctggccactggcaataccctgagttattagaaaatgtaaggagctgttcctcatccctgtttcctgtgtccttaacctttctctgtttttagtttctcagcattcaagggctgagccagtgctctttagtgaaggacttctactttgtggatatgagcaatttctccccatttctctttcccatcttgtctctaacgtggagggaagggagtgatgtttgtccacagcaccttcggcaactatcatgacatgtttgcgagcgtcaccttcttgtgctagactcatagccatgatgcatatttggcatatttggtgctcaataaatgacctcacatagacacacagcaacatgtgaaaagccagtaggaaggaagatcgactgcctcatacaaggtcagcaaacctttctgtaaagggacagaagtaaatatttttggctctgtggccatatggtctctgtcacaaatactcaactctgccagttagaaagcagccatggacaagaggcaggtgaacgggcatggctgtttcaatcatctttatttataaaaaaaaaaaaaatgtgggccaacctggccttcaacctgtagctttccagcctagtataaccttttctttagctattctcttttgtttagtcttagagttaatgactatgtcgaaaaagtctttgagaccaggaataaaatttaaggaaaaatatgctaatcacgttatttccaaattataggtaaaataagtacaaataatagcagattacagtgggactagtttagtgaaagactagaggacatataatagaggcacatgtaaaaattatagataatagtgtcaactttcataacttaaagtgaaaaatttcttttaccatgtttactttgcaggcagaaaaataacattagtaaggaataattgctatttctttttggttatttttctctcattcatattaacttttcctaaatttcaaaactgttaggctcaatatctcataatctgtatgaggagaatatttttgtatcatctgctctgaaaaactaaactgattatattctctactaaacacctgctcatatcctgttaatgtctctaagcagaggaagaaatggttgctctaaacaggtgacaaagccctgattttgcacacgtaaagatttccttgcttcccacatgatgggcatctttccactcatggtaagccatcattgtcttcttagtttatattcactgattcagtatttcctgagtacctgctatgagccaagcactgctcataagttttctgtgcttcagcaaatcagtgagcaaaagagacaaagatctccatcctcaaggtgcttgtttttcacagggaggggcaggtagtcaacaataaacacaataaagtgggcagtacagagtggtaaaagtgaacagaattatggagaacagtaggacagagtgatgagagtgcagagcgctgtgctgtgtgtatctgggtgggggaggtttcagggttaagcagggtgatcagagcagtgggtagaccccctgaaaagatgaagcttgagacaaaatttgaaaaagataaagaaatagatcatggctatctgagagaagagacttccaaatggagagcagatagagcaaggatcacgagacaggtgcttgccacttgcatccatggatgagcatggagtctggcatggctgcagcagtgagggagggtggagctttcagaggggaggctggactggtattgggtccagaccatggatggcctcagagcccaccagctcagaagtgggaagtgattgcagggtgctgggcagaagtgtgtctaaaaggaagtctcaaagaatgcttctgactgctctgctcagagtagactgcaggggtcaggggtagaaacagtggagtctgtgagaggcttgagcaacctcccagtgaaagatgatggtgactccaaccaggttgtagcattggaggtggtgagaaaagccagatttgggtagatcttgaaagtaggacaatcacattttctgagggattggaggcagggcgtgagagaaagaatgatgctcaggatgatgctcaggtttttggcctgttgtatgttaatagaaatcctctctatacagagatttaaaaagaaaatgctgttgaagtgttatccaataacaactacccttatatatttttttttttttttttttttttttttattatactctaagttttagggtacatgtgcacattgtgcaggttagttacatatgtatacatgtgccatgctggtgcgctgcacccactaatgtgtcatctagcattaggtatatctcccaatgctatccctcccccctcccccgaccccaccacagtccccagagtgtgatattccccttcctgtgtccatgtgatctcattgttcaattcccacctatgagtgagaatatgcggtgtttggttttttgttcttgcgatagtttactgagaatgatggtttccaatttcatccatgtccctacaaaggatatgaactcatcattttttatggctgcatagtattccatggtgtatatgtgccacattttcttaatccagtctatcattgttggacatttgggttggttccaagtctttgctattgtgaatagtgccgcagtaaacatacgtgtgcatgtgtctttatagcagcatgatttatactcatttgggtatatacccagtaatgggatggctgggtcaaatggtatttctagttctagatccctgaggaatcgccacactgacttccacaatggttgaactagtttacagtcccaccaacagtgtaaaagtgttcctatttctccacatcctctccagcacctgttgtttcctgactttttaatgattgccattctaactggtgtgagatgatatctcatagtggttttgatttgcatttctctgatggccagtgatgatgagcattttttcatgtgttttttggctgcataaatgtcttcttttgagaagtgtctgttcatgtccttcgcccactttttgatggggttgtttgtttttttcttgtaaatttgtttgagttcattgtagattctggatattagccctttgtcagatgagtaggttgcgaaaattttctcccatgttgtaggttgcctgttcactctgatggtagtttcttttgctgtgcagaagctctttagtttaattagatcccatttgtcaattttgtcttttgttgccattgcttttggtgttttggacatgaagtccttgcccacgcctatgtcctgaatggtaatgcctaggttttcttctagggtttttatggttttaggtttaacgtttaaatctttaatccatcttgaattgatttttgtataaggtgtaaggaagggatccagtttcagctttctacatatggctaggaatccaacttacaagggatgtgaaggacctcttcaaggagaactacaaaccactgctcaaggaaataaaagaggacacaaacaaatggaagaacattccatgctcatgggtaggaagaatcaatatcgtgaaaatggccatactgcccaaggtaatttacagattcaatgccatccccatcaagctaccaatgactttcttcacagaattggaaaaaactactttaaagttcatatggaaccaaaaaagagcccgcattgccaagtcaatcctaagccaaaagaacaaagctggaggcatcacactacctgacttcaaactatactacaaggctacagtaaccaaaacagcatggtactggtaccaaaacagagatatagatcaatggaacagaacagagccctcagaaataatgccgcatatctacaactatctgatctttgacaaacctgagaaaaacaagcaatggggaaaggattccctatttaataaatggtgctgggaaaactggctacccttatatttgtattgtaactttatactgtcagatgaaaatgccaacagaatgtctcttctggtctgagaagaatagccatgtataaagcctgtctgcagcttactgttctctagcagaggttgtgcttttatggatagctcactggcttgcttcctagcagaggctcctagctagagggaggactctaactctcatggcgtgtgctgcttagtcttgagactaagaataagggtttggagtataataattagttcttggttctgttctgcttggaaaaaaaactcagaaagcctcttggtacccacaatgatgaaaatagtcattactaattgtattcgttggcacccaaggcataaacatgtacaaggcacttaataataacaccatcatcacatcgatttttatgattctcgggcttaccctgggccacacactttgttgggagctccacacattgtctttcaacccctcgcggcaccttgaaagctataatccttttgtaacacatgaagtgtctgaaatgcagaaaggttactggacttgtttaagtccaaatagatactgaagagtggggctggggctcccttgactccagacttgcctgcctccaatgtcagcgtccttctgattttcctgcctccaaaactcagggatttagatgaatgatgtattcatagcatgctaactcaacaaacacattgatttagtgttttctacgtgttagaaactgacttagcttgacattggaggataaaagatagattgattggttgatcaaatggtttttgaatgcttattatatgccagaggtgtgcaatactatagaaagataaagatgaatggtcctttgtcttaagaaggaaccaccatttcttggatgtcctggatggtggtgtttaaatactacaggacaagaagcagaagaaacctaaatgggaagccttctgtttgaaaacccttccttatttaggcatttcaaaaatgtattaatctaagaaacttggtatcttttgaattgcaaagtggacaatcatatttcaagaatgatttgaggcaggcttagcttaggtacaagttattataattattataatttgtacataagctaagtgtattagtttgttctcatactgctaataaagacatacctgggactgggtaatttacaaaggaaggaggtttaattggctcacagttccacatggctgaggaggcctcacaatcatggcagaaagtgaagaggaagaaggacacatcttacatggcagcaggcaacagatagcttgtgcagggaaattcccctctataaaaccatcagatctcatgagacttattcactaccacgggaacactatgggaggaaatggcccccatgattcaattatctccacctggccccgccaggtggctaatgtgcggggattattacaattcaaggtgagaattgggtgggaacacagccaaaccatatcactaagcctacctcaaaccatttgtaaaatattcttgaaatataattagttttctaatgtactctcattcaagttcttgtttgcctctgaaactcaccagtagatatgtaagaaatagtattcaaatcacgtgaggctctgaccatatcatttcaaaacacgctcatctctacttgagaacatgactccagcgccatctcttctgagatccttcttgctgattttacttaaattagatgccttcgcatacctgccacatcactttacactgttagatttttacatagctttgtcactgccagaaattatcacctacctgtctgttcatttattgctttgttttgacaaagtgtttgatttatgcaatataacatttaagtgaaaagagactcaatgttcatcaatagagtttaaaatttccaatctatatgacattatcaatagcttttttatattaaaatacattttatattaaacatacttgtattcacagatgacccaaattgttggaactaaaatttacatttatataaactcatcattgatctaaatacaatatggatatgaatttatatgtactttaatgtcatcaatattaatgtgaatttcaaataaaaatccataaaattgttaaacatggaggagacagatataaagatataaatgctgtctaggggaacagcatttcagatggaggaacaggcaaggagagaagcttggagtgtggtgaggaacaggcttggagagaagcttggagtgtggtgaggaacaggcaaggagagaagcttggagtgtggtgaggaacaggcaaggagagaagcttggagtgtggtgaggaacaggcaaggagagaagcttggagtgtggtgaggaacaggcttggagagaagcttggagtgtggtgaggaacaggcaaggagagaagcttggagtgtggtgaggaacaggcaaggagagaagcttggagtgtggtgaggaacaggcaaggagagaagcttggagtgtggtgaggaacaggcaaggagaggagcttggagtgtggtgaggaacaggcaaggagaggagcttggagtgtggtgaggaacaggcaaggagaggagcttggattgtggtgaggaatgaagagcatttgaaatactcacagaaggtcaatgtgacgcagatgcggtaagccaggcagagtgtggcaggagataaaaatagaaagataaacaagagccagataatacagggctttgtggaacatagtaaggagtttgaattttatccaagaggaatgggaagctactggaaggcttaaccaaagaatgacttgcttttatttatacctaaaatagattattgtgtttcctctgtggaaaagggattataagtgggcaaaaacagaaacagttaagaagtcattacagtacttgaggaaatggttcatgagttagactgggtggtgcaatggtgtgagagagaagagggtggattcagctggtgagctgattgtgggaagtgagggggaaacaatgggacttctagacttttggctgaagcaactgggtggatagttctattttcttggatttaatgttttggatgtgttaagtttcagaggcttattaggaatctatggctagtcaggactagaaaatataaatttggaactcatgcacttagggatgatagtatttgaaagcatgacccaacttagcttaagtagagatagggaggatagagagagaagggaggaggcccaggacaaacatcagggtttagaagtctggcagagaagccgaagccctcagagaagactgaggagtagccagagaagcaaggggattgacaggagaaggtggcagggaagctgatagaaggaaatgcctcaacaagcattctcaggtctgtcggctgctgctgaaagaaaacgaatcaccatattcggcagaaagaaagaaaatgaatcaccatgtttggaaacatgaaggccactggtggcgatgataaaaggagctttatgggagtggtggggaaggacactgacaagaatgggaggaagagaatgaaattcaagggagtggaaatgaggaaaagagctagaaagacactggctcagggcagggtttcagagggaaggatatcatggagttggttagtgtgttggtgagaattctcttgtgtggatgacattatgatggtgcagaggagagagcggaaaacagctgaagcacaaagcctttgtgccttgagagctggtgaggtcccgagtgctgggggaggtgttgccttgagacaggaatgggaacaccttgacgttgcttccatcctcttggaaggttggagttggtggaggggagatggaattcctctatctcttctctatagagaaggaagaagaagaaatattggaggcttcagcagcataaagaaagtgtgaaatacttggatgtcttggatactggagttttgtttagaagggaagtgtagcagaacctctggatggtgataagtatgtgtttcagatttgtgaccttgagtttagagtgtggacagtcactatggctttgtgattttcttcagctactggctgatggtgcagtgaaatagaattgtaaatgggacctcaagctctccggaggaaatgggctcctggtgactaatggagacacccaaatttagataacagattcaagcggccatagggggtggtgagaggagaaccatctcttcacaaacatcctacttcatgtgctttctgtgaccagagccaagaaaaacagtggctagactcctcacctccaccccattggccattttaaaagaaaacacctgacaaaggcacttctaatgttgggatgggaagccacccagtcagggcttggctatctcaaccaataagaactgaacacacgtgaatcctacatttgcataaacagacgtgacagagaacctgggagaaaacttttcctatttgagccataaacccttcctttgttcttcggtgcacacactttcatttgtgcttccccagtctgcgggaattttttttgtctttttttttttttgactgttttatagagaacaaagctcttcctttttcctctgcagatttcatgatcttttgttaacagcgctgagtaggtgaatagttggtttgaataggttattgctttgctgtgtgaattcaatggaaacaaagtttgtggttatagtttatcaaattgaataacgtgattataatgatgggccctggaccccaaagtgggaaagttcaaagtaagaccaggaggggatgacagataataaaaacattttaaggtcaatggatttgtggtttacaatgttgaaaatggttggagtaggcagcacagagtaagtgagctggaaagataaggcttagtaggagaatgagatgttaacatcagtctttttaatattattattattattttgagacagagtctcactctgtcgtccaggctggagtgcagggacatgatctcagctcactgtaacctctgcttcccaggctcaagcaattctcctacctcagcctcccgagtagctggaaccacaggcacctgccaccacgcctggctaattttttgtattttgggtacagatggggttttgccatgttgcccaggctggtctctgactcctgagctcagacaatccacccaccctaggggctgggattacagtgtgagccactgcacccagccagtatcagtcttatggggtgggacatttattgttacatggcaagggctaaggcgtgatcgtggggctgggcctcatgggatggtggaggaaagagtgtcgtgggagagaaagctaaggatttgagagctcactgctcagtggattatctacgcgcaagctgaagtcactgaaaatggtaacaagagtaggtagagatgaagatggagccagccgctgaagtccgtggtggatgaaggaaagaacgtgggaggtctgaagatggcagggaaacgcaggtggtgtagtcagatggcgtgtgctccaaaggaattggaggcttttggaggagaaagaaggagatatcgtgtgaatacagcagtgggagtaagggcgtgcttgccccacctgcaggccatggcttatgtacaatatgggaggaaaaacattcctgtggagaaggaggctgggaaagtcatgctcgctgatagctaggggtgaagagaatttttaaagaggaactacagtatgcaagagaggatttagggagctgatatatacgagcaggatgcagaggaaaagtttgggaaaatgggatagggtgagaaattatagaatgcacaggaagtgatggagaggagttagaaaatggtcaaatgactttgaaaatccaatcatttcaaagcacatagccttctgtgctaaggagaaacacacaactgctttgctaagtcaggcatggcaacattaactgtcctctgctgccccttcccctgtctgccttaaactcagaagccccattctcctgagctttggttgggcatatggctgcctgctggagactgcatatcccagcctccccagtgaaaaagctggaccatgtatctaagtcccccagcagtgaaaggcccttaaaaggagggatttggggctcggtttctcttctcataggattaagcatgggtgtggtggggagtcagtatcgacggcatggacgattagaacatcccgaggaaagccagtgcaatgtcaagggtatcagagccctagatgacttcatgcagcggagctgcttacctgccctgagccgcctgcctgcttctcgaaattgtgaaagatcaatcaggtctacttcattaggccctaaacactacatctcatgtccaggttctggctttgaaagtatttgaacatatgctaatagccagtctcattacgtcactttataggatcacataaatcaccatttcagaccctagaatattcctggtcgaggtcaggacacatttgaaaatgtgggaaaggctgtataatagccttcaggtttttatgacttctttactacctgagggattagtcaacaaatttcgtaataaatccacagatatttgaatcaacaaaaagtactgacaagtgtcatgtaattttcctcatgtttttgagggttacatggcaggtgctgtttgtatcatgtactcttcagctcctttttaggggaacagcatgctagcatttctgcgttttggggtgaggcctgctgtcgtcaccctggtgcgagcacatgaagtgaactggacacctaacagtgtggttttcctctctgtgccagcggctcggattccctccctcacctgcaggctgagcaggtcggcttgtccatcattctgctttttaagtgaatcagagggcaaaacttccctttccctggagcagttgagccatctcttttgattcagttgtgcaagtctccagcctcagtgagggctgtaaaaggcaatcatgcaaagtgtctggttctttaagggaatggtattcgtcagatttctgacttttttgagatgctgttggtggagaaatactttctgatgcttcaaatgcaacatcttttatgcagttcagtaagaaaaaatcttcctcaatcctcatttttacaaacatgtccatttgatttgttactttgcatggttacattatttttgtgtaataattactgtggctcttaataacaaggttaattatcactagcaagttaatgtgttccaccaggagcactttttttttaccctgtcttcctgttatgtggtagtttttctgtttcttccagtagaagcttcagtgagtctgcatgcatgcacaataaagggttgtacgagcagtgttttgggcaagacaggcctggagagctttgtcccatgccagtgccatggggcccaatgaaagcctggcctgggtcttaattaaggacagagagacatggagcaccatccaaggggagagaacaaatctgttccttcacagcagatcctatttgcaagtgccactctctctgcctgaaattctcttctctcaactttccatcagtttcctgatagttttctttttttttttaagaaaaaaaaaaaaacttcgttgagatataattcacattccgtacaactcacccacttaaactgtatgactcaatggttttcaatatattcacaagtaggtgcaaacatcaccacagtcaattttagaacatttttatcacctcaaaaagaaacctagaactctttccaaatggccccatcttctcatcaccatggctaagaaaccatttacctcctttctgtctctgtggacccctccattctggattttcatgtgaacagaatcatagagtatgtggtcttttgtgactgacgtctttcacctgccacgatgttattaaggttcaagcatgttgtaggatgtattagtacttcattatcttttatggctgaatgaggtttcattatgcagatagaccttattttgcttatccattcagctattgaaaatctggcttttgtgaacaatgctgctatgaacatggacatgaaaatgcctcttcaagatcctactttcaattatttggaacatatgggtaagttgtctttagtggcttcattaaaaaagtaaaacacaaacaggtggaattaattttaataatacgttttacttacttcgatatatctaaatctcacatcaacaaatcatcaattaaacacgtaataagagagtttgcattcttttccactctaaatctgtgaaatccaggacatagtttgcacttgcagctgacctcagttggaaccagcccatttcacgtgggcaatacgcacaggtgcctagtggctactgtgttgaacaggaccctctaatcctcgaggtgctgggattcaggaggagctgactgtgtggtgatagctgctcctgaacttcaggttgcatcctctttctctctctctctcactcctcgagaaacatacagcaaaagctcttggcaaagcttccaacctcattgtcagacccatctgattttattcagtgagaaggattacgtgatctggctcttgatatgatgagctaagttcgagttgtatttctttcaagagaattttgagtctgaaatacaaaaagtgtcccagcaatacacctattctcccttgcgctgagtcactttggacaatttaacctcaaataatgacagggaattcttgataccttgctgttcaacattttgtcagctctaatgagtgttcaatttataactaatgacaatgcatcttatagggtgggccagcccatatgggtgggggtcgatgtgagagggtaatcgttataatttcagcacatactttaacagtggcagttgtacattttgcataaaggcctgaagtcatgtgacatcaagaatatatgaggaaaacaaaagcatcttccgatacaaataatgtaatatgatagttattcatataatattgccccttttcacttgagttgtttatttaaaaccgagttagggagggtgtgacaaaataacagatgctcccatgaatgctcatctctttaaatctggcctcagctgatgtcagtcagagtctactagactaatggggctgctgcaaatctcagctttgccgccggcttgggcacgtttcctcagcgtctctggctccccgtattcttgtcttcaacacaatgggtggaagtgtggttcagtgtctaagaaagtctccagcacagtgtgggatggggacaggctcctgttttccttttcttctcagaagcccatgagctggtgcaccatcttgttcatctcgactcacaggtacaggtttgggatcacagtgtgcattattagggacagaaagagagtgccactgagataaaggcaggaagagagtaccactgagatacaggcagaaggctaccaaggacatctttatattcttttgcagaccactggggtcacttgaatttagaatttaccaggtgcaattttgcaaactatcttaattatcttgacattataaaagcctgtaatcttgtacttctgacatctgagtaattaggactttgaacaccagtgccttctaggtcacaggcttgcattttttccactgcagattggctgtcagccattaccacctttctgctccaatggaaacctttctaaatgagagcgggattggacaggatggctttgatttgaatcgctgtaaaaacaactttcatgtattgagctgcattgaatttttatttgcgcactgaactttattttatattttaaaaagacaaataacaagctattatatttggcagataaaaagagacatatgagcgtgataaatttggctgtggatctctctgacctaatctaataatcattttggtttcaaaacccgaatgatttctcagagcagctttttacttgcttatacagctcagttaagaagaacacaaatagttccccaggcacacccaagatacagaaacattataaaacattgcttattaattgctttttaggttaagaattatggtaaggaaagattttgatttttgagagacattaaagtaaaatgatatttacccttcacatgctaatttacccttgtaagttatgggacatttttatccattctgtaagttgtgtgaagcttttgaaacatctttagatagaagttatttcttttcagtctatttttctaaggacctttgctggcaaataagaaagttcatttaccaggggatatgtataagtattgaatgttaaatatttgttggggaaagatgaaaatgacattaatgcatcaattaacacttagtgcaaatatttttaacacattgttaggccctacttctggttttcaaaattgtaacaccattatgtcataggaataaaattctccttataaaatatttatatacatatagtacatattatacggtgtgatatacatatatatatagtatatattatctgttattttatatataaatacacagtattttacaggacttgttttttccagaagaaagcaactttgttagaattttatataaacctactttttgactaaaatttactttaaagaaatgatacaatcctttgggcaaactattgaacaaacaaaaattcccttttcactttccattgagttgatttagttgaaaacattcagttgaaaaaatcaatgtacgtattttagaatactttttttagaccaagctgaggatttagggtctgttctttactgtgggggagggaatgaagcctcaaaaatgatcttgtgcaatcggaaaagttgtcagaagcctgtgtgtccgtgagaatgagaagcaggtaaccgtaattggtgaggatgctcaaccagctaccattgcgctccggggagcatgtgaccagtgttactgcggcagaccagagcctgggtcacccccggtataccgactgtgagtcaaccactcccttaaaaaaatggaagcagtgcatcagagtcatgcaaaatatctgctacacctgcctgacgggtcactgctgggccatgctcaccctgcagtgagttcccttagaggcgggttatgacgagggtcccatccctgcctcctactgctgctttaatgctgctggcctgcccactcaccatcacccagaatagcctaagatcccaccctgggcactaagctctgtttctctgtctttcacagatttccctcccatgtatcgtcatggtccagtgtgtcttatttcacttccctggaccttcactgcctgggttaggatcagtgcagtgttagaaatacagactttaggtcgcagctcctactcgggtaagttacttagcctctctgtctcagctctttcctctccaaaacaggtaaatttattaccttgactcattaaaaccccaagccttgagaggaaggttgatagtacatggatcttttcatttgcaaggatggggaagaaaggaaaaagagaatttaaaggtaatagaataaagttggagaacttgttcaaatgacaattacattgtctgcttttaaatcatgtattttatttatttgttttgccatattttgttatttagtaccaactaattgccagacactgtgctgggctctcggtgtacaaaagtacagagaacccagatccagggccttccatttgcatggagaggaggttgtaatagacatatgaacacataggtatagcaagtgtagaaactgaagtgtgacaagatatttgtcaggcaagaggaaggcactgacggtggcccagaattctgtcacagaggaggagacatttgtcttgaattttgaaaggtggaaaatggttaatcagcattagcggggagggatctgggcagaaaaggaaagattagagtgtgctcagcctctttgggaattgataagtggtttgcacaaccgaaaagcaaggtgtgaggggaggacctatgagattcaatggtgggcatgtagacaagggtcctaggagccagacaaagacatttagagttcacacttcaggaatcaatgaccacgacaatgatgtgacgaggtcacagaaaccagcagagaacatagttttttttaaaaagttgcctggatgcagcggcccctgcctgtaagcttagtaatttgggaggccaaggatggaggatagcttgagtccaggagttcaagaccagcctgagcaacatagcaaaatcccatctctacacaaaatttaaaaaattagtccagtgtggttgcacgtggctgtagttccagctgctcaggaggctgaggcaggaggatcgctagagcctgagagattgagactgcagtgagccatgattgcaccaccccatccctgcctgggcaacagagtgagactgtctcagaacaaaaaatatcgttaacatttgttttgattgacaaatcataactgtatacatttgtgggatacaatgtgatattttgataattgtatacaagatgaaataattagatcaagctaacatattcatcgccttgcttacctgttctctttcatggtgagacaattgaaatttatgctcttagttattctgaaatatatgacacatcattactgactacagtaccttgctatgcaatggatcaccaaccctctgtctatctgaaactttgttctctttgatcatcaactcctcactccctgtcttcccgcaccccgcacctgtcagcctctggtaaccatcattctacttcctgcttctatgagttgaaccttattagatttcacatgccagtgagatcatggggtatttgtctttctgcgcctaccttatttctctcagcataaagtcctccagattcatccatgttgtcacaaatgacaggatttccttcttttgaaaggctgaatagtatgccattgtatatataccacatttatccattcatccacggatggacacttaggttgattccacatcttggctgttatgaatagggctgcaataactatggatgtgcagacgtctcttggacctaccttcggttcctttggatacacacccagaagcgagattactgcatcatttactggttctatattcagttttttgaggaacctccatgtcattttccacaatggctgtagtaatttacatttccactacgcataagagttccctttcctctgcatcctcttcaacatttatttttcatgtttttgatgatagtcattccaacaggggtgaggtgataactcattgtggtttttatttgcatttctctaataattagagatgctgagcattttttcatgtaccaactagctacttgtaaatcttcttttgaggactttgggtcctttgcccattttaacatcatctaattatttgttttcttgctattgagttgagtttcttttatattttggacattagctgcttatttgatgtatgatttgcaaatgttttactccattttgtgggttgtctcttctctctgctgattgtttccattgctgtgcagaagcttttgagtttgaagccattttatttgtgtgtttttgcttttattgcctgtgctttcagggtcttatccaaaaaaaattattgtccacaccaacgttatagaactttcccttatgttttcttctagttattttagaatttcagtttttatatttaagtcttttatccatttttaaaattttatttatttatttagagacagggtctcactctgccacccaggctggagtgcagtggtgtgatctcggctcactgcaacctccgcctcctgggttcaagtgattctcatggctcagcctcctgagtagctgggattacaagcacctgccaccacgcccggataagttttctatttttagtagagatggggtttcaccatgttgcccaggctggtctcaaactcctgacctcaggtgatgtacctgtttcggccttccaaattgctgctattacaggcatgagccaccacaccaggccaaatcttttatccattttaagtggatttttgtgtaagtcataagataagggtctaatttcattatttcacatgtggatatgcagtttttccaacatcatttgttggagagactctcctttccccattgtgtgttcttggcaccctcatcaaaaatcagttgaccataaatgtgggggattatttctgggtgttccatcctgttccattgattgatttgtctgttttttatgccagttctagggtgtactaattgcaactgctaaaagagtttaaaatgagggagtgtgatgcctccagctgtgttcttttccttcatgattgttttggctatttaaggtcttttgtagttccatatgaatttaaggattgtgttttctatttctgtaagaaatgaccttgaatatttgataagggctggactgaatctatagaacatattgggtagtttgtacattttcacaacattatttcttctacccataaacatggaaaatatttctatttatttgtgttttcatcattttctttcatcagcattttatagttttcagtatgcaggtcttttacctcctgggttaaattaatacctaagtatttatttattttgttgctattgtaaatgggattttttttgaaatttactttttaaatatttgttattagtatatagaacgctactgatttttgtacgttgattttatatcctgaaatcttaatttgtttatatgtcctaacagtttttttgtggagcctttagggcgttctatataaaagatcaatttgtccgcaaatagagacatttcacttcttccctcaattagaatgccttttgtttctttctcttgctaagacttctagtgctatgttgagtaggagtggtgagagtgggcatccttctccctgatcctaggagaaacgctttcgactttccaccattgagaatgacgttagctatgggtgtggcatgggcgtctctcctgtgctgaggcagctccctctatgctggatctgcgagggtttgctattctgaagggcgttgaagcacgctgggggctgagcctggagcacctgtgggggtgcttcctgtggcgtggtgcctctggctagtttttctgatgtgccacctccatgggccaggcccgatctgtgccctgtttgctgtgagccccacctgtttttgtttctgactggccctgtgggcactcccaatgtttcccgtgggacaagacaggagtgagctcctgcaaaggggcccagaatggcgggggagcattttccgtgggacaagacaggcgtgagctcctgcaaaggggcccagaatggtggggaagcatttcccgtgggacaagacaggagtgagctcctgcaaaggggcccagaatggtggggaagcgtttcccgtgggacaagacaggcgtgagctcctgcaaaggggcccagaatggtggggaagcgtttcccgtgggacaagacaggcgtgagctcctgcaaaggggcccagaatggtggggaagcgtttcccgtgggacaagacaggcgtgagctccggcaaaggggcccagaatggtggggaagcgtttcccgtgggacaagacaggcgtgagctcctgcaaaggggcccagaatggtggggaagcatttcccgtgggacaacacaagtgtgagctcctgcaaaggggcccagaatggtggggaagcagaacttctgcctccaactcactttctcactgtgctactgcggatccagaggaatctctgcatgtgaggctctgccaggttggggaggagtgtgcgctcaacatctctctccactttttaccattgcaacagcttttcttagctctggggtccaggagtgtgtctcagccttagtcctgagttctgggacatgcacgatggtattcttgcctgtggagagctgctagttgaatttctgtggtggtgagtgatgtcagtgaagtcccattctggtttctctctgatgtcacactgagagcagtcttggtgagaagattatctttgtgtaaaagcaaagaacagaggagagaacctgcatttctcctctgcagtatccgctgcgtttttctgtagaattgggtgtgccatttgcaagagctgtgtgtgtgcagcagagaaggcagccaaccaatccttgcggttcagcgtgagttgggagggagaaagcgcaaaccactaagtgtagacaacacgcagggagttcagttgggaagtttagcgagtggtgtccaaagcagagttgctccctcagcactatgggcaggttgggccacacaattctttgttgttggggagggaaggctgtcttgtgccttgtaggaggtttggcagcatccctggcctggacaccccatgacagtggcaacccctcccctagcggtgacaaacgtaaaggtctccagatgttgctaaatgtcctctggtgggggtgggaagggcattgccctgtgtgaggaccgctggtagagactgatgcagggttcagaaaagagatttttctttttcagttgggacatacatgatcagtcttggggaaggaagcagaagcaatggtggaataggacaaagataaaggaaagaggtggaaagtgatgcacaaagaccgccatgacccggtgtggggcgatatgagtgaggacagcatccagtgaagaggtcctggctcctgactgcgatttggtggctctactgtaccctgtgcaaagggtataagttggtgcttattttctctccatgtggtcagaagtctcatcttcaaagtgcttaaactgtagcccttgccctgtcacctctggttactgctgggacctgggtcacactcctggttcatctgctggccccaggccgggtgaggctcccacgtgcctgctggcctgagaaaggcttacgtgagtcacaggggctactaggggcagagagaagggaacaggatggagaaattaagtgaggaataagattgtacaaagccaggaagaagccgaaaggggacttggctctggcagcattttgttttgcgtgagtctgtgctggaataagctgtcgaaaggttgtctacccattgccttctggtaccttgtgctgtgctcattgttggcaaaacacttgaatgattgtggcctaaatgtgcagtgataaaatacagaacatagctttgttatttttccaaccagactaggagagtggcttttggaatcaagatttaaaattcatgatttgcttgtgttttggcttgtattttggcttgtgcttgaaatgacaagaaagatcaagggtttaaatgtgatcttgagaagacataagagagagaattgatattttcctatctaatatttatattactttcctgtatagagtaggctaaggattttatttggacgctaattatatgtaattcctatagcagttattttgattaagccaactagatttacctctaattattcattttaagccctagatttaaagataactttttattctctgtaaacaacctaaaagttgccttagatttatatttcataatatgtaaaaatgctgaaaaagggcttgtttggctggagagacattttaattttttcctttaattttaaatgacaatattgtgtgtataggagctgcgtttcctaccgaatattcacctggtgtggagactgaataacatgccactctaagggttaataaaagcattaaataacttgcatctgggaaacatcaattgaacagataattgcttctttgtgtttctgcttagtagtggctggacatgtaaagtttctataccacaaaatgaaaacagttgagcaaacaagaggcccggggtcacataaccgatgcatgctcaaagctcaaagcagcgtcaatcaaacctggagggtaccatgtcaagagatggtatctttttattaatcaggaattggtacccggacgatagagggcctctgtaatgaaaacctcagttagcaaacagccagaagagagagaaaataatccaaccagccaaataatcagagaacacatgaagtgtctgtagggagatttccacagtgggaaacccatagaaaaagttctatctctcactcttgtttttgttttttggttttggatacaatttcatttaagtagaaagatcatccatgattttcccaatcttccttatgtcttttatgcactatacttgccaaagtagcataggcagaaaaaaagcaggaatcctatggatttccacccttagtccttcaactaactttaaaataactttttatttttttattcaggtctacgttctaagtcacactcccctcccacatgtctttgcccgctattttacttcattaatatttaccagcttttctgaatttaggcaccaattttgtattttcatatatttctatgcatatccttcagatccttattttccttaatattcatgtaaaatatataaactataatttctgtgttcttttaagagatagcaggtacctaaacaaaggggtgttctcccgtgatttttttaactcagcattttttgccagaaatggtcacttgggatttattcctatgcccttgtgtttttccctccccctcccctttccctcccttccctccctttatctttttctctctcccttcctcctgcccacccaccctacatttttccctccgtccctcccttcttgctccctccctctctttcttccttcctccctcccaccctcctttccttcttttcctctctttctttgtcctttcttctcttccctcctcctttccacccttttcctttcaccaatatttattgagtgcttattgcataagagactttgagtgcccagtgctggcttgtggcaggacaagctgcagacaaaacccctcagacaccaagttgtagaaggaagggctttattcggctgggagcgttggcaagactcacgtctccaacaaccgacctccccgaatgagcaattcctgtcccttttaagggctcacaactctaagggggtccgcgtgagaggatcgtgattgactgagcaagctgagggttcatgactgggggctgcatgcactggtagttagaacagagaagaacaggacagggatttttcacagtgctgttccatacaatgtctgtaatctacaattaacctgactgattaggtcaggggtcgatctttaactaccaggcccagtgtgtggcactgggctgtctgcctgtggatttcatttctgccttttagtttttacttcttatttctttggaggcagaaattgcgcataagacaatatgaggagtggtctcctcccgtagctaaggactctgacccctccttctgtgggactccatgtattctttctcattgggaacactgggaatagcagggcccagttgagtttggagagtgtcgcttagtgctctttagttgcaaccatctgaaaataacatgaaaagaaaggggaatttcctgaaaaatgttggtggtagcaatgagagcaaggctcaaagaataaactggaagctgagaaactaggcttggaaatagaaatcaaagggactggggaagcaaggaccctgcattcgtctctaggcaggaagggttcactcagcgcactggtgctgtgataaatatcacgtgcctctgctgttctctcatcacggatcaagagtccaagcctggagggagagcgactgaaagccatgggctggtcacaggcctgcctgagagctgcacgggagctggcgaggaaaagcccttgctgcttccagtgtaaggcaggtgtctggatttatcttcaagagagccaacatgatgaatgaaggaacttaaatcatggcacggttagaaagaaaagtagcaagacaggaactactccttctctccaaacaaaaagaaaaacaaaatgagatattcactataattaatatgaatttgcaagggaaataacacagtatatgatctcagtctcaacttatatctttatttcaactatatctacttcagaaaggatttgaagggtttccaataaaagacaaataaaatgttataaatggtagataaatgaagatcaaatatgaccctggtagaggtatgataattttctctgtctcgttcaagagctacactggctgcacctgatatagtagatgctcaataagtatcattaccttctgccaggtccctcccaggacacgtggggattatgggaactacaattcaatatgagatttggttagggacacagccaaaccatatcagtattacattttattgcaactattggctcaatagttgcactatgtatttttgtttaaagttattgctcaagcgtttaccatatatattgttaacttatcacagtttattcttaagtactattatatcatctcccaagtaatataaaaatcttacagcagtatataagcagtcctggcttttcgtggttcttatatgcaggaatttttgttactgtgctttgattagataacatgtataattccttcatggacacagtgcaaatttcactttccacagtgtattaactacgtgtaatttcattcagtaaaaattttgatgctggtttttagtacaaaaattagtaagtatttaatggacaagcatgatgatcagtgagcaatcatgctctctctgtgaaagtgtgctggttatttgtcgctgtgtacctgtgcatctgtatgaatttagtttagacagatatcaaggtgtgtagttgtgtaaactacttgtcctccagtcataaactcacataatttaacttctaaagcaccatcactgttggataagtgtccaagtcacctttattcatttggatacctccatgaaaatgttaaaaagctgctttttactaacaaatacaactttaatcgtccagctagtggaccaaggagttatttcaatgtttaaagcctactgtcttagacaaacttttcaacagacttctgaagctacaactggagatcatgcaatttttaggctaagttttgaaagatatattagttaaaaatgcagttgaaatacttaagcatcatggcagcaaagaaagtgagtaatatgtgcgtgcagtacagcagaaacttgtattgctctgtgaaaataacatgcaggataccaacagaatgcaagtggagctattggctcattttgctcctgcttgtgcagaacttttcatgtcaggccatctcctgggctactggtgagtttatggatcggcccagctgtagtctatcctgttgttcctgaagtggggtggaggtcagccagcagcctgcaaaaatgttagaaaataagagtcaagcaggacttctgatgcccccagatcatgttattgttatgatcagccatccacagcaagtgtcttatttgaattatatccgatgatagcgatggatctacgttgctgtttgcctcttgtaacccacagagtgagaatgcaaaatccagggttaggagtgcagtcagtggcagtgtgactaggtgtttctctgtaggatactaagaaaaatacagcccaggaaactgttagtgctttcattttgtttcactataggtctgcctggatgatcaaaacagatgggaaggagccatggtggggcaatgatcctcttctgttgcctcctggagattcaagcattatatatggagagctatcatctctacccctcctcccggtttactctcatggtgaggtcaggtagagtttagcagggatgttcatgtgaatatcgtctgtgtttgtgaataggctcgtatttcagttgcaagcaacatgataactttaaagttcagttgctggttaataactgtcttttttattaagttgatactgaacttgatgtctttttgcagcactaacagagattactggtgctaccttttagcttttgatcatttatgcaagcctagatctttagctttacgttgcaaaaggggtatttttttcaacatttttttggtgagagtattaaagttgacattattatgatcacaagtgtaaacaggtatataaggaagtggcgatacattgttaagactgctgttattcatgatgcttagccaaatgaaggtgcaattaatactgccatgtagaactggaataacatcagctcaggaacagcaagtttagatagtttgactgtagtgaattttcatgaatggaatagttaatcattttagtggatcttgggggtcaattcaggctgttttacttgatccacttcttatcattatccttacaaagtcttctgagataacacagcactgatagttgctaacagactttatatctaccgcgttattagcattttatcttgatacactgataaaataagcttcaggaatacttaaaagattgcaatggcttccagctgccaaatgctagatttaattatttttaggaccaacatgagggtttagacacaccacttgtggtgcagcacacatgtattatccaaactgaaattagcaattcaactgaagtccatgtagagtcgaaaaatgtgaatatttggagatgatttggctcactttattttgtagaaaagaaaacagattcagggaaagggcatgcattgcctaaggtgattcagcaggtttggagcagaaacgcaatacaatctctgttcttttgctgctcagatccagaattttttcacaatactgaactacttatgtttctgattccttattttttctgttttatattttgccaatattgtcttaccaagatcctattctttaccccaaatatttaaattcattaccactattgtctctttataagtaaaagtactagttgttattataaatgattattcgatcacttttcattttttggggggtccagtacaaagttagtaacaaataaacattataggccttggcaatccaaggggagctcaagtcctccagggcacgtcaggaaaagcctaaatgacagctgagcttcgagtggacagaatacagctctcatacggactgttgagtatttgatattcttcaacagtttcattcatcttcagttttttcgtctttgaagtgatggatttagtccttgctatactcgactttcaagtttcttttgaaataattatagattcacaggaagttgcaaaaggtgcagggatgtcttaggtactcttcactaattctcccagcggtgacatctcgcatagccatagagcatatcaaaacctggaaactgacataggtgcaattcagaaagcttgctcagatcacaaccattttgtacacatttgtttttgtatgtatttgtgtgtgtgtgtgtgtgcatgtgttctgtgcatttttatctcgtgtagatctctgtaactacaacctcgaccgtcaagatacagaactgtagcctcaccaccaggctccaacttgcaatctttgtggacactctgacacattttcctccacccgttccccttggcaaccccatagtctgttctccatctttacaattttatttctataatttatataaatgtaattgtacaaaatcgtatttttgaagggaagaaacaagtcacagatatttttgttctcactgcaaaataatctttaacactcatttattttatgttctatttgtctcaaaaaatgtgccttgttctttcccatattttctgatatcaggataggaaatcaatagcaaacaaaacataattccattcattttttttccacagcttggttttcactgctgtttcctaacgcttattgttccatttactctttctctctgttttccatcacataaaagtaactttgtgttctttatctcttctaagaaaacttggtaatgagtctttaatgtgaagcccggaccacccttgttttgattttgtgttatgggtgttcttttgtgtgatcgctttcatggagagtccttgtgaagctgggcttttccaatggtttgtcaaaatggaaatagatatttaacaaaccaaacacaaaatgaccttgctccaggaatgcatcatttctgagaaaacactacctcttccaactagagactgtgaatattactcatattatcctttactcccttttattaaaactgtattttttttacacatttgtataactcgggtaatgaaatgtgaaactaagtgattgcctaccaattacaattgatattaatgatgctagtgggaggccacctctacagtggctgtgccatgtctagggacttgctagctttgctaagttacataggattgcctacgtactaaatgcaaacttactcatgcacataggaaaccatttgtattaatatgattaagaagccctgcctaaccctgatgaaaaattacttgaaaataacagaagagagtccttattttaaagtacattaactattgggagtaattactatcagtccaaacataactggatctaatgagactgaacagaaacaaattagacataattggaagctaagcaaaagtcaattaaactcctataattttacctttataaaaattattgaattaaatgacctggatcaattagcagaggaaataaagccatgaagaatatttccgggaaactattaccttttttgagggaaaaatattgtttcacttaatgattagaatttagtaaaatgtagcttaatgaattttgctgccttagcagtttaataacttcaaatgaagtaattatgcaaattttttgatagcttgacctacaaagtaatgcaggagttgttttagggaatccaggagtagaatttatttgatagaataaaataacatatttataaaaatcagcaaattcagatggtttggaataaagatatgattgcttttactcaatattcactttagggctgggttagctgtgtggggattgcagttgacctgttgtagaaattgtgtgcttggaaatatatcaccacattgctccatgtagactccctctgtgattcaagtcttgttcctacagcactgctgtcaaccttcaaccaccgtcaccctatagaccccaagtcagtttgtattcagtaatgcaagtggtgttctgtgcaactggtcacccaagaacttggtgctaagaaactgagaaagtgatgaccaagacaatctcatcaaaacacagccagggccagtcacagtatcgtaatttctgctttctggatgttcaaggaaatgtagatcatgactccttctgtgatgcctcattatcttcaaaaggagctataagcgtacactcatttccaaatgtgatggaataagattgcagtttcaattaggtcctaaagtataattaattatataatagttataaaaatattaattctgtaaggacagtcacaaaggaaagaacagtagcaaataggtctcaggaaatatatcaaatgagatgttaaggtgtgatgcagctttgtacatactatgctaaatacattatgtctgtaattaaaccagctgcatacacaatgtaggtgtggcaaattctttgctgaaacatgtatgccagtttcctcattttttaaaatgacaagtgcatgcttaatcaggttagagtggatagattatgatattatcaatgcactggacaaatccattaatgatacagtgagattttgtgcagaaaaatggaatagagaggtgtgaatccaaactttgaagaataaagaacatacatttgtaattaagaaatatctctcactttcatcccttatgtgccacacatagcacaatccagccccacccagccatgactcttacatatatcactcctgacaaagccggcctggcaattcagacctggagcccagggaaaagagaggaatcccatgatttctggcaaacactgctgcttcttttgtagtggtgtgagatgaatgcctctacatgcacacaagtgccatgttgagggggatgaatctttcaagatttgtttaaagtcaaataatgtgaaggtccatgactgacctccaggcctctcagagcttcagttaactcctttgtgttaggggatgttagaagaacgtttacaagtcagagcaggtgatgctcaggagcaagagtgaatgaggaggaggaacccaaacaggtccagcacagaacatcagcatctgagcatcaagtctacccctgagaaaaagtggtccaaaggtttgtgtggaccccattctccaggccttacaaaccctgtgatttctgcctcattctgtcccgtcctgtcactttgagtctgaattggaagagagaaaaacagtaactagatcagtaaagtaaggaggagtgaagagcaggaaggtggaggtcgtgatggtggaagatggaaacctcctcgcgtgaaatagaacagtttggatgtcagctgtcactgctctagatctcctaaaacccactccatttttattaaaaatatacattgcatttttccagtgtacacgatatcatgttaagagttcataaagttttgaggatgtgagtaatcagaaaggaggtttaaagaaccgattattttggtggtctggctcctttaccccagtaggaaaagatgccattttgcttatgccctgtgctgaatttcagaatgcctgtcaacccaacacgcttcagcatgaactttaactcaaaaaatcaaaaagtaccaggatcaatttacaatcctagctatatgatattttagaaattacaaagcctgtaaatgagctattttgtcaacttcatagatgagaaatctaagagtgggttagtcagttctcttagatttctcatatccataaagtggatagaacatctaatttagaggcttgttgaaggatagacagaaatggcatttacaaagtatctagtgaaactactggtagggattatatgctcagtaaatgatgagcactataatcacaaataatttgatctttgaaagtgtaaaatgtatttgtctgtccgcttggtttttctcggaggcatagtttccctctgtcactcaggctggagtgcagtgctgtgctcactgcagcctctgcctctcaggttcaagtgattctcctgcctcagctgggattacaggagcccgccaccatggcccaactaatttttgagtttttactagagatggggtttcaccatgttacccaggatggccttgaaccttggcctcaagtgatccatccaccttggcctccgaaagtgctgggattacaggcatgagccactgtgcccggccacatttattttaattcagagaacaatttttcagtaaggttgtacaaatgattgtcctacattcctgcatgtttgaaactctttttctctttttgtctccatatgtgaatgacagtttggctaggtatagaatgcttggtttacactttttattgttcataaatctatagtcttatctttgttcccatcctctataccagcttgagtaggattagagtgtgggattcacctataaaactctatacccattgaacaagtcctcttttccccctccgctagtccctggcatctgccattttacgtctctgtttctaagagtttgactactttaaaaacctcatataagaaggatcatgcagcactgtgtttgtatttttgtgactggtttatttcacttagtatagtatccccaaggtttatctatgttatgacatatgaaaggatttcctttttttttaaggctgaataataatttattgtgtatataccactttttaaaatccattcatctcttgacagatatttaggttgcttttacctcttggctattatgaataatgctgcaatgaacatgagatgaacaagctccttttttatctctttacttttgttagaagcttttaattcctgattaatgagttctgaacgtatgcagaggtctctacctggcagtgacctaaagccttgtcttctgccaccccactcagccttcagattcacgtctctagattcttgaggttgggaaatgtttctctagcagccatggttttgcattcattggccattcaggttttctgctttgccatcttcccccgggggtttccttatcctcctggaagcacaactaggcatttaagtccatgttgactgtattttacctgctatttctatgtgttttgcaataagggcttttcaagatacccataacttgtggctaaaaatgaggtttgttccaatgtgccttagaaatatccagtttcatacttacctggcagggcagataccatgatcttaaaggcagttttcccagggcaaggcttatccattccactctggatccatcatagggatatgctgatccctggaattgccccaaatgtgggaagctctactgcaaaatttttggtagtgagcgatggcattatgcattcatgtatgaattcaactgagtatccagtttcatagaaataataataacatcttctataaaatgtattcttgtgtattaacacatggggctctctagtactcctgctgagatatatgggaatctaccctagttttgccattttctcctaacatcagtctacttcttttaatattcattgcttctccccatttctgtagttcagtgcatgttcctttcctctgcaggaactatttctctttcctcacccaactcataaatccctgcctcccaccctaagggtaggcacatgacccaacctgggagatcaaaatgtcacacccccaatacaggattggtttgtgagtaggcagatgattctgtccatgcacagaactaagtagaagagagtttttatacctcagcttagcttgatgctagcagagagctactggagttctatttcctcctctagggaagaaaaggattttggtttggagataaagccaagataccaagaaagtgggaatgaaagacttagagacagggagtcctggccccttttcagatgctcagatgctggcactagcttgaggcccagttctgcttctgctcttcccaacagccccttttcagatgttggcactagctggaggcccagctctgcttctgctcttctcaacatttgttaaggggagctcccaatttcttttctaagatagctggtttgacttggatatccatctcttctaatcaagggtcctgattccttgtcattgtcatcaaaaaaaatttgtaaatatttcacttcttgctgacatgcttttggtgttgaacaaagtgatttgcacagatacaatctctgcatcttaatagcttacattctaagagctgtacacctggcactctttctctggaactataactgctacattcaagaatctttattaataatacttttcagatatatagttaaaaaataattttaatagttgaaaggcatccatctttccaagaggtttagacatactgcaattgagtgctaagtgacttttagtttgtatttttgtattttttaatatttgtatttccataggttattggggaacaagtggtactcaagatggatgaaggatttaaatccaagacaagaaactataaaaattctaaaagacaacattgggaaaactcttctagacattggcttaggcaaggatttcatgaacaagaacccataagcaaatgcaataagaacaaaaataaatagctgggacctaatcaaactaaagagcttttgcacagcaaaagaaacagtcagcagagtaaacagacaacacacagagtgggagaaaatcttcacaatctatacatctgacacaggactgatatccagaatctacaatggactcaaacaaattagcaagaaacaaacaaataatcccatccaaaagtgggctaaggacatgaatagacttttaggtatttgtgtgtgcagacctcttggtgtcaaggctaaactgttcctttctctgacacataggaaattgatgcacaataccttgcagtgtataattccaggcccctaggctttggagactgggttatcttttcactcaactgacagttgatacattgtttgcactgaaaaatctggctttgttgaaccacaccagtttatgtttttaattccaaatgttaccttgttatgaactatttttttgtcctttcctctagagaaatgctaatgctgcttgcttacatggaaagtaaagttaaggagttggtgttgacattttggcttgctgtcacaggcaaaaaagagtagtgctgtttttgtgtgtttaattttctttcactttccccactctgtgtattggaggatgcctttagcaataagtagtccttatccaggtcactcactcattaaccaccaaccactgacagtaatgtctttactagatattttgcttcttttgattaatttgtctctatttcctttgttctaaagcctatagtgagtaatcatatttggaataatagtagagctccctgctgtgttttcatttgcttaaatcaagacttagctgatgtattgaggaaccaagactgagatgtggggctaggagggcctagggtctgtcaggcactcttcagtgacttgaggtgctgaatgactcacactgtactgggagatgaccacctgtgtgcatccaacactgtcacagatgtgccattgagccaccaggagcagccacagaccatcagtggttgtgctttggaatacgcaattttgtgtttctggtgagctgtaatcttttcttttcccgtataattatttttcattgaattatgctattaaaactcatctttgggtttcttgtaacgtcattgccgagaacattatttttgcatttcacagtgatttcttgaggaggaagtaagaagtaattgttttctggactcactgtctgaaaaacttgcactttactgaagcgattgttttatttacactaagtaacaatatgagttttgttagccttttggatggactacaaagcataaaaccaactttgttcctcatctctggcaaagatggagggttgttggcttgcattgtgtgatgagtcttatacctggctctgtctgctcttgccttttgccttacatttcaaagacctcacttttttttttctttttttaaaaaatattttatcacgtgattttatatacattttaataaaatttcttttttgtaaaaaaagcaaagcataaataaaatagggtagccatttcttctaaggttatgttgaatctaacccaaactcttatcagagaaaactcttctttagatgtagcctaaagcaggaagcaacaaacctgtatacagccaaagtatcatctcaagggcctgcattcaagtctcacacatgtggcttgaaagtgatctctttcgcccttatttcaaggcctaatcttaggttacatactgcttaaagaagcttcagtatgcaatttcaaagcctgtagtagatgtaaaatgagaaaattagaaataaggagaaaagctgctacatgaggacactgacagcaaggaaagggagagaaaaactcacaaagtaagtggaaaaatagaccaatgcaaataaccccacatagtttaacagacctcatcatatctattgtgtacatgtttgtatgacatagattatatctattatatgtaacccagtgttcatagtgttgacttagaaattatcaaccaaattcaaagcttttaggctttgaaaattgtttgaaaagattttcacccaaaatatttaaattattaaaaaaaattattgttgattaaagttgtaatcctcaattaattagaagttttggctatccagagaccttatattccaaagactttagagagctgtttgttagatgacataaattattaccattatcctacatttaaacttctaatttacgtaaatagtgagcaaaattgagagccacacaaatattcaatctctgaagctcttatggcagcattgatcaaataggttagagagcacatggatacagctttattgccttctagttttactgcaaacgtgctatttaatagtatgcaaatgattggctagaggtacagaccgccagggccttcatagcaaacaggttttgtgtttaccctagcatacaaaaatgcttcatctacgatgtatgctgtaactgtgtgtattgtctaccctagcatgcaaaaatgcttcatctaaaatgtatgctataactatgtgtattatattatctataattatatttctccttggtttaatattagatattttcaggtacaagaaatgtatgcacattatagattcaatgcatgcaggttatatgtgtaaatatttattgataagaggcattaaacccctgccttctgtgctggataaactcctgaacttagcctccaaaacaccacagtagcctccctggtaagcacagggctctttctctacccttttgtgtctcccacgctcccacttgtctacaagagctgagtgtagatcaagagcaataaagttcatttccccaaaataaggcgtagcgttcaggttttgtgatacctgattggtttacattgtttacaggtggggcctcgaaggggtaaaaatcagaagtttcttattctgagcgcaagggcaagatcattgagcagacattgacctcccttcagacatttcttgggagaaacagaatgagaatttcaggggccagtgcctgcaccctactagctgtggcagcctggtgctcatctacttctccagcttgggaaggcctaggttaaccccagtctttggaggcattgttattcctcttctctccctgcttccccgtgtttgtgttctgggcccggtgtaacactgaggttcagaattgctttcaagagaggagcccatttctgtgtctatgcaaggctggacaatttctccaagtggttcagcctgtgggggttaagggggcaaaagcatctcagctagtaataaacactgctttgcctcttgcttttttatttttatttttgcaaaacttctctgtaggtgtgtatttctctagaggatttcaaaaattctctgtaggtgcgtatttgtgtagaggaaggagtggtgactgggccagggtgaatggattatttgatctatattatcttgaattttatatcttttattttaaaatttgggtatattttgaagtaggaaatcaatgcacatggctaaatatctaaaaaatgtaaaagtatacattgaaaagtcttcctcctaatctcgtaattgtctccatttcagtccccatggccacatcatgaggctactgatgtcattagtttcttttgcgttcttctagggtttctgttggcatatgcaagcaaaaataaatgtatacctttatgttttctctttttacagcaagggcagtttattaaacacactgttttaaaccttattttttctctaaataatatttcatataagtcaatatgtagactttatgtatttttaaaatgaagacatagcattccattgaacttagacaaaaatttacttaactagtccaagattgaagaataaaattattttgaatcttttgttaatagttaatagctttgatgagtacacttatgcatacattattttacacatgttcaagtatgttgtataaaccccaaagtgggaatgctctgtcaaatattacaggtatttgcaactttgatagatactaattgccctcggtagaggtagtaaaagcttacactccacagccttactgatgatatatattataaaaattttagttcttgccaatctaaaggtgaaaaatgttatttcatggtaatttaaatgcttttctcgttttataactgaggttgacatctatcaaaaaattatttgaatttttctgagaactatttatctttgaatccttttctgttgtttatcttttccttcttcatttctaaaacttcctatacagagagattcactcgttatctgtgatatgattacaaatgtctgccctccaatttgttatatgtctttagatccaaataccttattttttgccatgtagaaatttttaatttgtatgtgataaaatgttaatactttatggattctggattttcagaaataaaaaggtcatcctcacttccaggttttaaagaaattctttaatgttattttatgtttttgtatagttttatttttattcacattaaaatttttgtcgtatttggaatttattttggtatgtgatgtgggaaatgaatctaactttattttttcatatatcttcctagttgtacaaacatcaacattgttgaaacatctcatctgtccccttgatgtgagatggcatcctaatttcctttacttagaggggtggtgtctggggatgagatcacctggggtgtaatcatacgtctttgactgggagtggggctgaaaaggagttcccatgttcctggtcatgtgatatgtggtcatgtgatgtggagaagatctcctgtgacatggagctggaggagggaataggaactagctctggctcagaggacacagacttccactgttttatcaacatttaggagattttcttgaataaatgcttattaatttgcatctgcccttaggtcaatttccagagactttaaatgtgttttataatttttaccagttaaacggttgtttcactgcagggaaaagagtatcccaagctcctctcctctggaaatctgatcaaattcttttttaagtccttcagtaatggttaattgtatatgtgtatatcatatttacatttatatttattgatataacagttatgcttggtgtttcatgcatatatgatagcatcttatgtgttcataaattttaaaagttgttttctatgtgatctgatttatttgcttgagaaaaactgttttctggtagcttcatttggggacttgctcagtggtaattttttaaatgacagctttatgcagtatttttatgatctcttcttttacccaggagtgattacttctctattttccgctgtgttaaaactaggtggtttctctttctactcccttccaggcctctcactactagaattctgtcaatgagagtatccgtggcatgttatttaatgtttgttattttgctattacatacacttctatttctaacatttgatttactgctttgaatgatccactttgagtcctggctgttatagctgagttgaccaagtcctcctcctcagacccccacctgtgtgtgtgcacatcgtgtctctcagctctggagctgcagatgatgtcagggtctcagcaaacgagacccctcaaagttgaaaactgtacaaacatcatatgcagcagccttgatctaccctatgtcttccattctttcctccttcttcttctactttttgttagtttcgatattggtttatttccagggcatgtggcatttatattcattttattaccctggttctcatgtttattttagttttagtcaatgcaattcacaattataatatttcaccatagtttttctttagttatttctttgttggctaaagtttgttctctgggacttttcccaagtaggaaaatattccctgactttgtgtgtatttaaaactgcctgaagtatactttgaaatgtagcctgactaggtataaaacctttggttttcattccactttttgaatatcttgtaggtaatgggccactgtatgttggcattaaattttgctaggaaaaaatatgagactagcctgttacattctcttttttaagagtggcttgattaaaggatcttttccttaatgtttctttaaaattttctagggtgttcttagtgtttccttttctgtggaacctaattttattctggaaaagttttgttgaatcagttcttaaagggattcatgctctttcaatgctgtctttttttttctttccataccttccttttttgatatattttagattgtctctgcttatcttctatagccactgttttccttctaataatttttagattttccctttaattttactgtatttacttttacatttttatttatattttctatgttccttactgagttttctaaagtctgttttaatttctctacttcttctaggtttaccttcatttctatgaagattttggtttttcttcatgtttgctggtttttgtcagcacatttttttattctaacatttcaccacttctttctctgagttcttatatttctgcttcatggtcttccacttttgatctgacagctccattaagttttcatttcatggcaaaatatttggttaacattttcatcttgcttttgggattgatttttgttgtgtgatctttctccattgataagtttgcatttttccccatagttttttcttatagtgtctttacataaatcaataattattaattactgaattaattgaaatattttgaaccaataatttgtgaaaagtttctatgaagaagaaaggaggaggcaaagttgtcttgcaaacttagcaacccaacaatcttctccttcaccaccatagaattagatggcttctgcagatacagctaagtcttctccttcaccactgcagaattaggaggcttctgcagatatggctaaatcttctccttcaccaccgtagaattaggaggcttctgcagatacggctaagtcttctccttcaccaccgtagaagtggatggattctgcaaatatggctaaatcttctccttcaccaccatagaattagatggcttctgcagatacggctaagtcttctctttcaccaccatagaattaggtggcttctgcagatatggctaagtcttctccttcaccaccatagaattggatggattgtgcaaatatggctaagtcttctccttcatcaccatagaattaggtggcttctgcagatacggctaagtcttctccttcaccttcataggattaggtggcttctgcagatatggctaagtcttctccttcaccaccataggattagatggattctgcagatacggctaagtcttctccttcaccaccatagaattaggtggcttctgcagatatggctaagagcttaacaacccaacagtcttctctttcaccaccataggattaaatggcttctgcagatatggctaaatcttctccttcaccaccatagaattaggtggcttctgcagatatggctaagtcttctccttcaccatcataggattcagtggcttctgcagatacagctaagagcttaacaacccaacagtcttctccttcactgccatagaattcagtggcttctgcagatacacctaagtcatcggctctttgtagagcatcaccttctctgagtgacactgagtccagaaaggcttcgatgacctcggtccatagaggttctgaatccattattacaaacaaaaaatacaacttttatatttcagagtccctggccttcagccctttctgaaatcagccaccactgtgcctttaagccatcactgtgcttttcttcctttggtcttccatggcttgcttgatttcagctgtttagagtctctatatgtacttttgtgtctatgatccatttctatttactcctagttcgacttaaaatgaaattgtattttaaaatatattcttgctgtttttagtattattttcaggaagagtagtgagcaatgctgtttattcaactctggtcataccatgtccccctgattgtattctcttcatgcatctctaatagagctcctagacttttccaaggcttatattgaagtgacttaatacatgtttgtcaatgtttcctacattttctactcttcatatgtctcatatatgatgcttcagtaagagtccccagtgtttgggggactcctactcttttggagtagccaaactctgaatgtataatatttcttttcccctgcttccatcagtggtagtagacaccctggagggtctaattgcaagcataaccacccaacagttctctcctttagtttagagccctgtagtcagtgttggccagtaagttgtcatggagcacccagagtggacacttcaacagggtctggtagtcagtgctggccagtaggttgtcatggggtacccagagtggacactttgatgtggtctgggagcagagcattatgtccactcttgaatgatagctgggacacgttggacggtggaatcaacaaaatcacaggcttcatggatgacctgggattttcctgcattcagtcggtaaaaagtgtgaagagtattaagtccctctgagattgagagggaacgtaattttaagaacaactggcatcagatcgtttattcattttacttgacaagaatttacaaacatctttaatatgtgccacaaccatggactaatataatatagaatacaaatgcacaaaagagaacagaaaagtggaaaatgtcaagtaacacacagagaaaaaatattactggccgggcgcagtggctcatgcctgtaattgcagccctttgggaggccgaggtaggtggatcatcaggtcaggagttcgagaccagtctgaccaacatggtgaaaccctgtctctactaaaaatacaaaaaaattagccgagcatggtggcgggcgcctataatcccagctactcaggaggctgaggcaggagaatcacttgaacctgggaggcagaggttgcagtgagccgacattgcaccactgtactccagcctgggcaacagagagagactccatctcaaaaaaaaaaaaaaaaaaaaagtacttgagaggatatgaaaaactgttccccagaagtggcataatttggaagtcatagtgtatgttggtgtcaaggaaataagtgagttcttttttttaaagaaaggtgttttgttttgttttaaagagaacaaggttcattaacaatatgcaaaacagatgaaatgcagtcaataacactatgaaaaatcactttctatacagaatgagaaaacatcaataacattttagcctttattttactgtttagtagagaattatcagtatagtgttttcactagttatcagcatcttaagggaagtacttatgtgtgttgtaccttttgaaaactggaatcatagattgctctaaattattgtattaaaaattgaagtaatgataactattcagctggaatgtcaggaaaatgttgaaaatgaccaagagtttaccagggaaaggctgcaaggtagcacctggtcatacctttaaatgacagacaaacacagacacatacacacaaaagcaacatttaagtagaggaaacttgttagcgctcctgtgtttagaggaagtaaaatgagtcagattagtgctttccatcgtgattgcctcatctgtgcttggagccacttcggaggattctgttggctttatcctggcaccgactagcactgcacagcgtagaaggcacaaggactgaaaaggtcatgtctttctgctcagaaaatttgaatggttatagagtgcagagggcccatgcaaaatgctcattatctgctgtgtctcttgttttcaaaattctttatcaggttactggcaataaaatgctgttcccttttgttaccagacaatgaggcatttataccagcaagtcacctgagaacatagcagccaacattaatgagttgaaagtaccactgggacagtgaagaattgacaagactgctggcctgctgatcttgtttatcttgcctttttttttctttttcaaggtttatttgtggaaagtctgttttcgttgcttatgtgctcatctgtgctgctttaaaatgccttcgtggtggcagagagtaattagcatatagagtctggaaaccaacttttaaattttattaatgagctgagtttagttcccctttgtcttttaactgactccaggagcattaatgaaaagtatataaatatgaatacaggtgtagtaataaaaaagaattatcagtcacccttaatttaattggtgtcaccttagcctttagaagggtaataggatagtattgccacctgcaatcattcaagactattttactcactacagtaattagctcactttaaaaaattaggtgacctttcaaaagtgagtaaaatagaatctggtgagaaccgttaagacacgtttgtgaatatagcattggtagaatatcatagatatttagggtttcgagcgacctgtggacattttgtgcaacttctgttaatgaaagaatctcttgaaacactcttttcatgcatggagttactaggcatctagcaactggaggttatatcaatgtgtcagatactccacagtctctcttctaatattacgtgcaaaataccctgtagactaggaagcatgtttgatcttggttataggtgcaatttattcaaccagcgttcgtctatgtgcattgaagtccattatgactacttttggcatggagacaaacacaaaacatggcctctgaaaagagtgtatgctgggatttgggataaggcatataaagaataactttactaaaaagctgaatattacatcatatgagttaaacactcttgccaagaattatcagtaaccataacagctaatgaaagtggatgtcactgcaaatcaaactagtgggcatctcttgtttattagcaaaattttccacattaaagaaacccttaaaacgacatttttacttgtaagatacacaagagacatatttgatttaggagacattcagagcagttttctgcctttgttgcatatgtacatcaaagtgctttagtgatagttgcaattttggtagttatctgccaagttagaaatgaatccaaactagtatattttgacctttcaattgaattgccacaaagcaaaattcactagtattcagtgcctcccatcaagcggaaatccaaagcatgttttcccattaaggagactccttctcttctcacagatagcaaatttccaaatgaggagagagctggttgaaggaccatgatgatgagccaatgataggtgttattgacctttcctgaaacagcttgacttctgaacattttttgaacttatacttatacttgagatacagtagatttgatatcacacattataatggatggttttctgataggacctgaccatttactagcctacgtccttctagttttctacataaactctctactgcagcaactaatgataattattattatagttgctaacatttgctgatcttattgttttctaggcactgtgctgagaacttcatatccatttatttcattttatcttgagaggtgacagcgtgctggcagcccttgcagccctggctcgctctctgtgcctcctcagccttggcgcccactctggccacgcttgaggagcccttctgcccgccactgcactgtgggagcctctttctgagctggccaaggccggagccggctccctcagcttgcagggaggtgtggagggagaggtgcaggcgggaactggggctgttcacggtgcttgagggccagcgcgagttccaggtgggcgtgggctccgcgggccccgcactcagagccgccagcctgcccacaagccccaggcagtcaggggcttagcacctgggccaccagctgctgtgctcgacttcttgctgggccttagctgcctccggcagggcagggcttgggacctgcagcccaccatgcctcagcctgcctacccccccacccccccatgggctcctgtgccacccgagcctccccgacaaggggtgctccctgctccagggctgtgcctagtcccatccaccgcccaagggctgaggagtgtggtcgtatagtgcggaactggcaggcagctccacctgcggccctggtgcaggatccactgggtgaagccagctgtgctcctgagtctggtgggaacttggagaatctttatgtctagctaagtgattgtaaatacaccaatcagcactctgtatctagctcaaggtttgtaaatacacgaatcagcaccctgcgtctacctcagggtttgtgaatgcaccaatcagcactctgtatctagttaatctgatgaggacttggagaacctttatgtctagctaagggattgtgaatgcaacaattggcactctgtatctagctcaaggtttgtaaatgcaccaatcagcactctgtgtctagctcagggtttgtaaatacaccaatcgacactgtacctagctaatctagtggggatgtggagaacttttgtgtctagctcagggattgtaaacgaaccaatcagcaccctgtcaaaactgaccaatcagctctttgtgaaacagaccaaacggctctctgtaaaatggaccaatcagcaggatgtgggtggggccagataagagaataaaagcaggctacctgagccagcagcttcaatccgctgggttccccttccacactgtggaagctttgttcttttgctctttgcaataaagcttgctactgctcactctttgggtccacactacctttatgagctgtaacactcaccgtgaaggtctgcagcttcactcctgaagccagcgataccaggagcccaccaggaggaacgaacaactctagacacactgccccaagagctgtaacactcaccgcgaaggtctgcagcttcattcctgagccagcgagaccgcaaacccaccagaaggaagaaactctgaacacatccgaacatcagaaggaacaaactccagacatgccacctttaagaactgtaacactcaccttgaaggtctgtagcttcattcttgaagtcagtgagaccaagagaacccaccaattctggacacaatcttataccacagaactgtaagttctattcttcttccaattttacaaaacagaaacagacaaacagaggtaattctctgaaagatgtctctctcagtccatttctgctgcaatgtaccttagactaggtaatttataaaacaacagacatgtattgctagtagttttggaggccagaggtcgaagctcaaggcagcagtagactcggtggctgctgagggcccattcatcatagatggagtcttctgtatgtcctcatatggtagcagtaaactcggtgcctgctgagggcccattcatcatagatggagttttctctatgtcctcatatggcagaagaaagaagcaagctctctcagacctttttataagggtactaaacccattcatgaagggtccacccttatgacctagtcacctcctagagaccccacctcttaatgttattgcattgggaattaggtttcaatgtatgaattttggaggaatgcaaacattcagatcagatctgtttgacctcacagccaaaactggcagtggaatttgcatgttgctcctggaacatatctagtaattttccatctctatacattttctatgctgtttcctctatactgaatgatccatactatccgtttaactttgtatctttaaaggcttgtgtgtgtgcccatctattttggtgaggttgttaccaaaacgccatgggtttggtctaggtcctgcttgctgctcactgcacagaaagccaatcactgagatggtgagtgtttccggggaagaagctttcatccggtgctgcagctgaggagatgggagctcagcctcaaatccatcgccctgactgactaaaaatggggttttatacaacaggcaagaaatgtaacaatgtgtaggaaacacgaactagggaggaacaaggagtcatctggtggcctcatctggtgagtttcagttctttaatgctttttttttttttttttttgagaggcctgaaggtcctttcctgagggaagaactcagatgaaacaaatacaagtttcaagctttaagagcggaagagtcaatgtctatgtttatacgaaagaacacgctataggagtattgggccggcttcagggtcagtaggatctattccagaattacaaacatcgtatataaacccctaagtctaaccagtgttttgagtttttcacttatcttatgtgtagccaccatgcatgtaacattaagacatcaattacatgtgtatgcttttgcctcttgttaatttttgttgctgttgttttttcaatttaattcacaggctccagcacaaaatgtaagatgggataggaaaagcttttttcctacccaacagaatgctgaaaatgtaaatattttttctttggtttacagtaataaggagtgtgattccttttttttttctacctcttctacttctacgttttaagagctctgtagcttagtgagctcccaggcttatgaacaccctgacacagctagtcttgaaatgttgccagcattgtaggatttgcatacttaacatgctacttatactgccataaagtatgtaaggtggaaaggatattgtcttttagtgtgggtacatagagcatggcacgagttgttgccagcctcacatcacatctgtcttctgattttatactttatatccaggatcatacagtcaagtttagacattttaaaaaatcttatttctatattactaaactattcatggagccagactcttctaagttactctgggaaaatgccttaggccttccaaggacacaaaattttcattcttataaaaagcatttggctaggaatcagaagacctacattttcattcaagaactggtactagtttgtgttgtgattttaggcagatccattattgtctctaagccacaatgtcctgaactccaaaaccacagcattggcctagatggtttcttaggcctctctttgtgtcgggaattggtgagttcttggtctcactgacttcaagaatgaagccatggaccctcgcagtgagcattacagttcttaaaggcggtgtgtccagagtttgctccttcctcttgtctggagttgttcattcctcctggtgggttcgtggtctggctggctcaggaatgaagctgtagaccttcgcggtgagtgttagagctcacaaaggcagtgtggacccaaagagtgagcagaaacaagatttattgcaaagagcaaaacaacaaagcttccacagtgcagaaggggaccctagcaggttaccactgctggctcaggcagcctgcttttattcccttatctggccccacctacaccttgctgattggtccattttacagagagctgatttgtctgttttacagagagctgattggtccgttttgacagggtgctgattggtgcatttacaatccctgagctagacgcaaaagttctccaagtccccactaggttagctagacacaaagcactgattggtgcatttacaaaccttgagctagacacaggttgctgattggtgcatccacaatcccttaggtagacacaaagattctccaagtccccactagacgcaggagcccagctggcttcacctagtggatcccgcacctggcctcaggtggatctgcctgccagtcccgcgccatgcgcctgcactcctcagcccttgggtggttgatgggactgggagctgtggagcaggttgcagtgctcctcggggaggctcaggccttgtaggagcccatggcaggggggaagctcaggcatgggaggctgcaagtgccaagccttgccccacaaggaggcagctgaggcctggcaagaatttgagcgcagcgccagtgggccagcactgctggaggactcagtgcaccccctgcagctgctggcccaggtgccaagcccctcactctctggggccagcggtgctggccagtcgctccgagtgcgggtgcaatgcccacagcagacccggttcccacccgtgcacagcagcccctgttccctctgacgcctctccctccacacctgtccacagcagagggagctggctgtggcctcaggcagcccagagaggggcccccacagtgcagcagtaggctgaagggctcctcaaatgcggccagagtgggcgccgaggccaaggaggcaccaagagccagccagggctgctagggctgccagcacattgtcacctctcatctttaatacaaattttgctatatgctctaaggctacaattttgtcttgttactctggtaataatacactttcaggcagtaacttgaaagaaaattcaattttcataaagtctccggaaaactggagaaagagagaattttatttcagtattgttgtcctgtggattggaatatgttctaactcacatcataattcttgaaacattataaaatataaaagcttaaactaatatgtttaattgactccaagagcattaatgaaaagtatataaataggaatacagatgtagtaataaaagagaattatcagtcacccttaatttaagtggtgtctccttagcttttagaagggtaataggtaaagactgttgtgctcagaacaccagaaatctattcgaactaggtgaaaatttgctagtgaaggtatttgtgaaaatagaaatgcagcttatgtaaaacctattcacttacatatgcccacaaatacagaaacatctgaatgctcagttttaacctattcctcagtaggttaaagtgctctgggcttacttgtctcttcctcttgacttggagagaagagaagcctttgcttttactcggcatgaaggaacctcaggatagtcacatctcaactcttagatgcctgagagctttgtaatgcaaatcaggctgctccttttttcttaccagcaacttaatttgggacaggattgattgactagaaagtttgctaatcagtttgaaacaaaactaggctgggggccaatggaagtttgccagaacctcccttccgaagacaaggtcgacagctggtctcactttggaaatgcttttgcccattatcttatcatttggtccattttatatggtccacatctcaaattacaatgtttattttgaaggcactccagagaaaagaaagaaaaaaagacaccacacatgacttagagaacagattttataatactttgaaaatgaggtacctcgttgtaaatttaaaatccgcctcctgattgttttagagttgataagtatattgacggttgtgaatgactgctgagctgtggcttttgggtgtagcggatgtgacaacctttgttggtgaagcaaagaaaacaagtttgatttgaccatgagaacatatgaattcctgaactgttaaaaataataactcttgtttgtgtcattctccaaagttttaaaataaaattagatcattgtgcccaaaccaaaaagttctgaagtcattgaagtgacggaatcataggatgcactgcaggggctgaaattccaaaccttgtagggacaggaaggtaacgtgaatgtatgaatcggactaaatgtggatagcagggaagagtgggttctatggaaaactagaaagaatatgcttctaaggatgttcaaatttggatttagaaaacaaataccaagcctgcaaaacaagagacctggaataaattatcagctttgaaaaaatcagagtttgaaaaaatatattaattcttatttcagagacatccatgtaatttagtgtctttcacaaggcagacaaaaagagcttaggagagagagacaaaggaaaatagaaacaaacaaaaggtgttaagcttctaaaaaacaggcactgtgttgggctttgaacatatagaatagcatgaattctcaccatgactacctgcagtagccagtattattcccacttcatggatgaaagattcaatcttagagagtttacgtaacttataacagcagaaaagcaagattttaattacaaatcctatgttctcttctctatactaaatgtatgaactcaagcaagttatttatcctctttattcttcatgttttaatgggcataataatggtttattcactagaatattttaagaattaaaaaagttaataattgtaaaaattctcacagaattttttttatgtttgttgaatatgaaagtatgataattacttttgttgagcaactatcagcatagcagatgtttaaactgtttctgcagagggatttgggcaagacaccttttattcttatacctgggttttattgtgaagttatatccagttaagcttgcaagaatttggagtgcagcctgcagttgtatgatggctgaggaatacaggaacattgtggttactgtaaacatgagagtaataactgcaaactaaggaataacagtatatcaatcaggatcctccaaagaaacagaagtgtgtgtgtgtgtgtgtgtgtgtgtgtgtgtgtgtgtagagagattaattgtagggaattggcttccacaattatagaggctgagaagtcctgtgatctctagttggcaagctgaagcctggagaccttgcagagctgatggtatagttccagcctgtctgaaggcctgagaacctggagggctgatggtgtgatttacagttcaaaagccagtgcgctcaagacccagaagatctaatgtttccatttgagtcagaagccaggaaaagactggtgatgttccagctcaagcagccgggcagaaggagttcccttgttccacaagagggccagacattttgttttattcaggccttcagttggttggataagattcacctacattaggaggacaattggctttactctataaatttaaatgttagtctcctcctgaaactctcacagccctcacagacataccaagaataatgtttggcttaatatctgggcaccctgtagcccagtcaagttgacacataaaagtaatcatcacatatggtaatatgtaataggataaactgtaatgagttaggaaatggtctgatgttaacaaaataataaagaaagcaaatgtgttgaatgcctatgggaacttgtaacgagatagtcatgcacatggtgaagaaatttgttagctgaagaagttcaatacactggctcctccaagataactttcccacagaaaactttgggagctactcaggtattgcatcctctgggagtaattaactattcactaacaggaggtttgcgtgtaaccagcaacagcaggtaaaatttcaggtgcttctatcaaagaactagagagatagctcagccactgctagatcctgtgcaaagatccctggagaatgcaccttccctgagggatgatgtgacacttacaatatacactgatgtatattgtatatgttttattgagttggagccagatggggtctatttactcccagttgattttcaggatcatcatttttatatattctcaacaaacctgtccctctctctcctcatggtaaccacctggcacaactctatcccttgtaaatccagctctccacagagctgagtgtggctggagaagcccacagtgacgctgattgctcttcccttacatttgtgatcactaaccggggctggctgcctgatttgcagggcccagggcaaaatgaaagtgtggggctgttaattcagaagacattttaaaaaagcctcattaaatgcactaaaatctaaggtgttttcattttaaaaataatttgtgacttataaaccataaaacaggcaacagtgacacacgagaaataacataaacttacaaattgcaaaaattatgtgtgactccacagtcacacacattaagccaccaatgcagctggccctgtcgctaaccgctagtaggctcctagcacacctgccattccaatgccttccctcgctcattcatgtttctgggaggctccttcagattctctctcctcttaagcctctaatgttttctctcccatcctcactctcagttaatgactttggggtatatgtcactgaaagaaaaacaaatttaagccaaaaccagaataagatgagagcttctgcaaactgctacttcctcatcaccccccacctggctctatgtccaaacactgtcttcctttttgttacccataagttaaactggagcactaaatcccaatgtctctctcgaatttcagcaattctccttctacctcccacaatgtcgacttttctgtctctactggagtgttcctatcaacatgcacagttgaattttcccatctggcactacctgtcctgatcttatgttcctttcaaactactgcactatttctgctttcttcagagtgaaattctttgaaagtgttttcatatttaccatctccaatttttgtcttcattcttcctcttagatccactaggtctgacagtttcctctgtcctttcacagaaattgctcatttcaaaatgtgaatatcttccatgttgttacagcccatgatcgattcttaaccctcttctcacttagccatgaatagcatttacacagctggttgttgcctgaccctcaaacactttctcacttggctccatgaccccacaggcttcttggcttccttccttcatctttggcctcatttctccctctgctttgctggttcctgctgttcatcctgtcctttacacactgcaacaacttaggggctagtcctctgacatcttctctacccgcatgtactcccttagggatttcaaacagtctcatagctttaagcaccatccatacactgacaactcccagattcaaaggtttagtccagaccttacccttgaactccaaatgggtatacccacgtacctaggagataatccttacactcccttctttctccactatgcttaatttaatctgtcagaacgtctgtgattctatcttccaaatagatccataacctgacccctcttcaccactcatcttgctactcctggtccaagtcacctccaccttgcacttggattatggcaacagtctcttaactgttctccctcttccattggctcttcttagtcttctattcattacatagggatcctgttaaaagacaggtctggtaatatcagtcctttgtaaacatgtccaatggcttctcaccacaatcagtaaaaaccaaaaaccctccatctggtggcccccagccccttcctcctccacctcacatgtgcttcctttgctcaccctctcttgactgcttgctgctcttcaaacatgttaggttatgctccttcctctaggcctctgtctgcaacatcctttctccaacatctttgtgggtggctctctcacttttacaggtcttgctcatgggccttctggcaagcccttccctgatcaccatgcttgcatggcaggctggcactctgtctgccctgtttagttttcttcatgagaacagaaagtcctgtttgtcttctttactgctttatgaccagggcctagaagcacttggcacaactaggcattcagtacagatttattaattgaatgactaaatagcagttgtgaatcagaacacaatggaatctatatctccaaaactttgtgatgaataaaactggctaaaatatgagaattttatgtaacttagtcacatatcataagattttctaagtagaattcatacttggttgtatgtcctaagatctttttagggaggtttcctctttctaaggggattcaaagatatcagtgaaacctgaaaattgtcttgggttaagtagtgcattgtggagtaccaaatggcatgaaagaacaaaactgctgtcattgtgactgccatagtcaatgtcaatgttggatatgactgcatgagctgacagcccctggagcatgtgaaatatatgaaatgcacactggacataacagagcatttttgcagggagctggaccaactcttttatatgactaagatgctatttgcaatttatataaaggaaaaaagcaaatatgctccatgcagtgcctaaaagagccctagtggcttccgggtagaaagccatcccacttctcttcagcagagcatgaaatcaacctactaccttttatcaggttacttacataaaggaattgtgcctattaataaaacatcatgcatcttatttctccaagagcaatgataaccaaactctcctttcccgttccctcttccttccttctctggggtcactttttgctgccctgtgttctgttcagcatgcattggccatgaggatcagattgttagtccagatgactttgaagtagtttttcttatggtaaggttttctcctaagtctgtagcatagaatccttgtttttgggttgatccatgcttaacctgaagatgatagaatgcaaattctgctttatatttgtgtatataaatattgcatcagtcacatgtccattttggtggcaacatcgtctgtggttttcttagctgccctgggattgaatttgcttaatcatgttcccttttctttcaggttgtgcttggcttcttgctgcccacacctactccatgatttcatgctaatttctgcccttcttctcagttagtgaaagcttccccgcactcattatcagcacacttgaatgtccacttagtgtcagacatacaatttttaaagtgagaatttcgtccaggacttttacaaagcctctcatgtggccactgactgcagttaaaaaactagcctgttagaatggtcaccttgacatcatagtccaaaagtgtcccaataatggatgtgccaaaaaattctgaaaccatcataggagttaaaaaatgagaacaccagcccacaaagaatggtatcacccaaacatttggaccaagtccacagtttttatatttttgtgccacatagcatagacagcctaatatatttaaagtaacacttaaaatgtactttagggattcaaattttagctgcttgtttctatttgctaatacagaacataaattttgaaaaaataaacttttaattgaaaattttacaaaaagtaaaataaaaaactgcttatatttccatccaagggaaagaagatacacatagtaaatactttaaatgtatgtatattctttcacccacttttaggatttatcctaagtataactagctgttttataaagatgttcatcatcattatttagagtaagaaaaaatgaacctaaatgttgacagataaaattcacggagtgagctatggtgcatgcacacagtggggaattatgcaggactgaacactatgtttaaaagcatttttaatggcatgtcaaacacttattctaatatggaaaatacagtgacttcgtggatatacaaaaacatcctcatttttgtgtaatcgtgtatcatatatgatcctaagtacgtaatactaaacatgagaaaaaatgcttgctaaaaacagaccaaaatgtagagggctgccactgtgtggtgtgatcggctgactttttgccttttaatttatattttgttggcacagaacattgttctcatgtgcccgaagagatttaaagatgatcttgagatgattagcctcctctcagagtcctgccggggtagataacagggaagattggggcaggtcagaggtgactctgggacgtttgtgcttggtgccctgctgcaagggacagcagctctgcagctccagcccactgtttgtcacaggtccttggtgactgtcttaccagttattttcaaattcaagataaaatggagatacagactttcacataaaactttctacatttaactaccagcaattacattttttgtcataaaacaaagggtaggtcaaacaaaacgtcttaagagtaaatctgtctacaatgtgttcaggaaacgaacacaggtcaggtttatgtggaagatatccagggcgtagcatatctgctggaagcatttcagtcatgagcacagctgggtattggccgtgaacctggtgtgcattgaatacacatccccgtggcccctacagtacattccctgtggatagtttattaggtttcctttattcccttcatctattcttccctttcctttcttccttcctctttttttgcctccctctctctcttcctgtctttattaaatatgtgggatgcagatttgatgaatatgtcaatcaaagatcaccaagaagtcttaaaacaggtaaaccacagaaaacagtcaggatcagaataagaacagtttagtggttctcaagctttttgttctcagaacttctttataatctaaaatgtgttgcgccccctgaaaagctttcacttttatgggataaaaataaatatttataaaatatatagtaaaaaatataaatatataaataaatttatgatttgtttatataaatatgtatataaaaccatatttatcatattaagatttgaaatggacaaatatttaaaatatttattagttaattttaaataattaccaacctttcaaataaataacattttaatgaaaattaaaaaaaattaaattccgcctggcgcagtggctcatgcctgtaatcccagcactttgagaggccgaggtgggcgaatcatttgagttcaggagttcgtgaccagcccgaccaacattgtgataccccatctctactaaaaatccaaaaaaattagctgggtgtggtggcatatgcctgtagtcccagctactcgggaggctgaggcaggagaattgcttgaacctgggaggcagaggttgcagtgagccaagatcgtgtcattgcactccagcctgggagacagagcaagactctgtctcaaaaaaaaaaaaattaaattccaatttaatttttattttaatttatttagttctaaaattatatttaattttgtaatttattttaattgtatattaatcacatttattttaaaaccaaataaatgtgttgagaagagagaaattgttttacatttttgcaaatctccttaatgtgtagcttaataaaagataactgtactattctgtttctgcatttaatctgttatgaagtcacctatcatgaatcttctggaaaattccacgtatatttgtgagagaatgagggtaaaaatggcgaataacatattagtattattataaaagtcattttggcctcctgttgccactgaaaaagtctcaggatgtcccaggggactttggcccacactttgagaatcaatgttcaggctcctttctgagctgattatgtagctgagcacgttgaacgtcatgtgattgagaacctgccccttccagccttcatctcttccattagcttccctaaaccattcattttttagggcattattttctatcaaatacaaacaccagtggaagagagaacacatgaagccattagtagtttaatgccttaatgtgaataaatttacttcatttcaatttgagagtccatggggtcacaaaggagatgaaagagaaagtacaagagccagacataaggttggaaagaaccctgtccccagtgaaaggccaattttttctttcacagcatcatcttggaacaacctgctttctggattcttagctcacaagtttgaaaaggagccattccctgatctattttaattgcttatcttcaaaaactatctgaactaaggtaccctgtggctactaccttccaatttaggactcaggtttccaggaaaagaaaagagttacaactactaataaaagtcagtcaaagtaactgctcctctttgaaagtctcagctcttattttagatatgggggttcacatgcaggtgtgttacatgggtgtattacacccagctagtgagtattgtacccctgggtagtttttcaatgcatgcccctcccttctttgccccccgcagtccacagcgcctgttgttcccatgtgcacgtccatgtgtgctcaatgcatagcttggagctcccacctataactgagaacatgcagtgtttaaatcccactaatttctatgaaaaagtatttctgttgataaccctgcaggaagctctttattaatgtcttcatcctttaaacctacttagccctatgctgctttagtcacctgtacttttttaaaaaactatttttttctctcattctgacttacttatccttacatgcattgctatttcttcattcctaaggaagtacgcattcgatttaagcatctgtgctaagacatccttggaaattaaattctagtcttttttaatggggcaaaatggaaatataatctcaggtaatgctttccagttcagcttactgctggtttttgcagatggaattataaacatacttaatcagagggaaattccaataaactttagccacagtatattcgtgcctttgcatgggaagagttgatctctcctcaagctagctgcagcctgcgtcttctgagggaagagctgtcttcacttgcgtgggatgaatttgagagatcactggccttgccgtctgagagtgcggtccctgagctgggaggattctgccgagattaggtcatgcaatcagcctgaggtgccaccatgggggtgagctcaaattatagttttgggaccatgcctgagtttagtcagcaaaagtaattcacaccagagggggaatgtgcaagaggtcaataacagaatgagaaatcaggggcagggaaaatgcaggttgtgaaagacgatgaagtgatgattagaggcaggctagggtggcctaccaatggtgaagtcctgggagtgaagaagacgtttgcttcataaataaagaaagacttctgtgctgcaggagaatcaactgttgagaggggtgaatggatgcagagtagtttccctgttaccacgtccaaacagatgtttatttgctggtaactgccatttcaaaaataccaccggaatactcattatttaaatgtttttgttacaccacaactttggaaaacatctctaagccaggcatataagccaaggttacatagtatgtcaggaaaggtataaccattaaattaattaactgtgttttgtctatgatttttaagaaaaaaatctatattttctgcgagtagtgagcaatacttatcaattggttagtcacttgtgtctgcgagtttcatcaccagcatgatcggaaaggtatctcccctcagcttcatttgcaaggaggcctgagtcgctctcagcctcccccatttctgtgctgcagcttctggggagcccctgacaccacagaccccagagcagcccctgccgacagcgtgcctgctccggacaatcccgagctaaggatctgttagtattaactgggattttctgtctcgtataatgcatggagcagtgtttcttaaattcattcttaaggaatgaatttgtgaagaaaatgcacagctgccccaaacactgtaggcactgaacgagcactcatggcttctctctttgcagaaatctctgtggactctcctgttcgtgggaggagtgcctttttctagggtgcagtggcttcctctccatgctcagctcgcacactcctggctctgcctctgccctccggccaccggtcccccagtcgtgccacatccctgctgcctgaggggatgcttgcacggctccctctgccgggactttccacctatatgctcggccttgacccctcactcacatacccttttcttcacaactctttcctgactctcaacaccatcctacactcacagagtactgcatgcctttctgacatagccgtgtgtcagtgtgctgtgggaagtgttttcatgtgtatatgactatttgcatgttatagcagtgtgtcagtgtgctgtgtgactttggtgtatgtgactatttgcatgttacagcagtgtgtcagtgtgctgtgtgaagggttttcatgtatatgactatttgcgtgttatagcagtgtgtcagtgtgctgcgtgacgtgttttcatgtgtatatgagtatttgtgtgttatagccatgtgtcagtgtgctgtgtgttttgtttatgtgactatttgcgtgttatagcagtgtgtcagtgtgctgtgtgaagtgttttcgtgtatatgactatttgcgtgttatagccgtgtgtcagtgtgctgtgtgaagtactttggtgtatgtgactatttgcatgttacagcagtgtgtcagtgtgctgtgtgaagtgttttcgtgtatatgactatttgcatgttatagcagcgtgtcagtgtgttgtgaagggttttcatgtctgtgactatctacatgttacagcagcgtgtcagtgtgctgtctgaagtgttttcatgtgtatatgactatttgcgtgttatagcagtgtgtcagtgtgctgtgtgaaggactttggtgtatgtgactatttgcatgttacagcagtgtgtcagtgtgctgtgtgaagtgttttcatgtgtgtgactatttccgtgttatagcagtgtgtccgtatgctgtgtgaagtgttttcgtgtatatgactatttgcgtgttacagcagtgtcagtgtgctgtgtgaagtgttttcatgtgtatgactatttgcatgttatagccgtgtgtcggtgtgctgtgtgaagtgttttcatgtgtatgactatttgcatgctatagcagtgtgtcagtgtgctgtgtgacgtgttttcatgtgtatatgactatttgcatgttatagcagtgtgtcagtgtgctgagggaggtgttttagtgtatatgactatttgcatgtcttctgcacactagatggagtgcagagtgtgttgcctgtttttctccaccgctccatcctcagtgcctgctacagtgttggacacacagtaggggttcagtaaatgctaatgaacagttgattaaatgagcaaaaacctttattgaatacctaccatgttccagacatggctaactgatgagaatttaccaattacatgcttgctgccttcagggagctcaacctcacaagacagaccgtcatgtagagacaactgctacacaacatgggaagaactgctagagatgtaaagatgtaaagacccaaaatgaagaagccagaacacatgaacacaaaaccagccaaccaacaaacacaagcagcatggagcatagagtctggggaccaactgcatggtgctgaggaatgcaggtggaggcagagtggaaatcacctgagtttccatcaggcagagttgcacttgaatttgagttctggcacttgctgagcctctctgattctgtcttctgtaaaataggagtaataatatttatttatatctaccgtacaggcaattgtgagatttacttaagacatactgtcttagtccatttttctgttgcttataacagaatacctgaaactaggtgacttatttttaaaaagcttatttcttagagttacgaaggctgagaagtccaaggatgggggtctgcagctggtgagggccttcttcctgacgggaaatcagaagagccctaaggtggttcagagcaccacatggcaaggggccgaggatgctagcgtgttagctcagatctctcttcttcttataaggccactagttcctctcccatgataacccgtttagccattaacccattagttctttaatccatgagtagattgattcataaggggataacccctgtgatccaatcaccacttaaaggacgcccctctcaatactcccatatcggggattgttgcaacacaaattaagatggcctattagatatccttaatcttacatcttaaggtgttctgtgatgttgcagttcaaccccctctcattcctctctactcttttagcagttacaaacaaacaaactcaccaaagaaaacaccagacaaacatacatccaatagtattgtgtccggaattggtgggttcttggtctcactgacttcaagaatgaagccacggacccttgcggtgagtgttacagttcctaaagatggtgtgtccagagtttgttccttcagatgttcagatgggtccagagtttcttccttctggtgggtttgtggtctcactggcttcaggagtgaagctgcagaccttcacagtgttacagctcataaaggtagcatggacccaaagagtgggcagcagccgccaaagacggtgcagacccaaagactgagcagcagcaagatttattgcaaaaggcaaaagaacggagcttccacagtctggaaggccctagccggttgccactgctagctcaggcagcctgcttttattcccttatctggcccaacccacatcctactcattggctcattttagagagagctgattggtccattttacagaaacctgattgggctgttttacagagagctgattggtccattttgacagagcactgattggtgcatttacaaacctttcgctagacacagagcgctgattggtgcatttacaatcctttagctagacaggaaagttctccaagtccccaccagattagctagacacagagcgctgatcgatgcagttacaaacctctagctaaacagaaaagttctccaagtccccacccgacacagaaacccagccggcttcagctctcaatggcacttgccctgagactttgcggcacctagcctgggtgctccggcagcctagtaggcaccggccggccacaccgagtgtgggcccctgagcctgcacccacccggaaccagcactggcccgcgagcatgcacagccccgctcccgcctgcgcctctacctgcacacctggtggggagcagagggagccgccgggcctccgccagccccagagaagggcccccacagcacagcggcgggctgaagggctcctggagcactgccagagcggttgctgagagccagtgagggctgctagcacgttgtcacctctcagtattaacaatacaaatacttttttgtcttatttgtcctttgacttatttataaccaaccgaatgtagagaaagtgatgctgatgttgagtgactctggaggctagaccagaaaatgttgaagagtatcagaatatacaaccctaatatatgttacttttgcataaattttatttttaaaatttttaatttttattttaagctgaaggcaattgagaaaaagaagatgcgagaagagctgtttacccttcctttatctgcttaaaagcaaggaataaatttccattataaaggtgtccccttgttctcataccaagaagaggagacagcatcaagattactctacataaagaaacccaactaaataacccttatctataatagtttctcccatatatttaccttcctacaatttaatgcccctagaagcccaagccccttttctttggttgcttccccacaatttatcgtactttgttaaaatggtaggtaagctcctaagtgtaaccacttctttggatttttttagttctttctctgcagttcccatgcatataaaaatattaacaacaaataaaatttgtatgctcttcattcgttggtccatcttttgtcagtttaattcacaaattaagctgcagaacctaagaggatggaggaaaagttttcctttcttacaagatcatgcagcatctgcttcacttactgaggagccccgagccaccatgtataaaatctgaatacccgaagacccccgtactgtgaggaagcccgaccacatggagaggccacatgaaggttctcaaatcagaaccccagctgaggtcccagcctacaaccagtatcaaccaccagacatgtgagtaatgatgtttccagttgattccaaccaacagcctttgggtcacctccagcctttgaatctttgcatctgaaatgccacgcatgacagagcagatacaagcatttctgctgtgtcctgtccaagtctctgactgatagaatctgggcttgttctaggcacctgagtcttgaggttgtttgttacacagccttagtaacttgaacaacggttatgcaacacttgagctagaccttgaaagatgaatggggatttttgtctagcaaaactgtttggaaaaggcttaatattttaggagaaaagttaaaaggtaagtgtggttaacacatgggttgtgggagagaatcaggagatgagatgaaaaaagttgatgtaagaaagtgtgctgtatggtttggtgaaaattataatatatttgttcatcagcataggcaattttcttccagaccactggctttgaaatgatgtatttttaaaattgcaaagtttataccatagaatttctggagccttctgaaatttcaattggagataaaacaggacttcaaaatgtaacttctcttaaattatgagctatggtttaactgatgagtaatttttagttttattgttggttaaaaacacactgtcattcccatgagtgctcgcatgcagttttagcatgtgtgtgtatgtctcttttattttttgttttgttttgttttgttttgttttgttttgtttgcggtgagcaggttggtatcagagttatgaatgagaagcattcttatcagaatatactggatactaatacattttgcatgtaattttctacagaggtaatgattttaatcaactttcaagatgaagcaccacatttgtcaaggcagaagacccaaatgtgcaattttttcttaggggaaaactggctataatgaatgtgctaaaatatgttagttatctactaacctcaatacgcaagaaagcactagatcatcagtttgcctggtaagggaaaaaacagcggctgcagcctgcccagctaaagaagaaagtggaatcagcagaacaagtggcctgtgaagatgccagcttgtgagaaatgcctggctgactgtgaacagggatattattaaatggatgcatatgatacatagcgtaattataccacttatggcagaaaaacatcaccattttatcaaatgctccactgtgtacatcaaagatcatggtatcatctatcatctatctctgggatgctgtgtgagctttgtggttctggaagagcttctagtcaagttttgattaattattgatggttttatttgattatagaagtagagcttgaatatgtgtgtgcgttttccatttttcttgtaagaactgacaatattgattaaatttcccttttaggagtgggaagcaagaagcaaagtaattgtcaccacttcttggagaagaatggcttatagtgctttgaacatatcgtctcaaaataacctctttggaagattagtggaaagaagcaaaactgtgaagaccttggttcacagtagctgttgatgtttctttttttcattttggtattgattataatcgcttcttcataaagctcagatgcagggtttatttccagttctttcaccgtgcttcttacctcagagtcaaaccattgctatactctccacatagttggtttccagtgtttaaattgcatgcatgtggggctcagatttgtgacattgctttacatatattactgtaaaaaaaaaaaataaccccaaatctagagtatataaggctttgtgctaagcaagcatggaaaagagttacttatggcttatatccatgtgtggactatgattgatagaatttcccttgcaattgccaaagagaagtctacatggtctttgaagaaacaaattacctatgaccccatgtatttgcatttgtgctcttcctaactatacagtacagtctgaatttagccccccaacatagggggatgttttagtggacaagcacttaattcattttaaggttttgaggatttatcttataagcacttactaagcactggttatgtctcaaggccagggctgcaccctggagactcagggaagcacaatacttgatttcatggatctcataatctagtgctatggaaacattaaaatattaaaaccacagtggagaagagcagtggataggtcttagggaagaaggcttgtatgaaaggtgatgcctgaaatcatacttagtcatctttatatatgataatttttatggaagaatgaaatcttcaggattcaatgatattttcattttagcaaactggccatctcttttctttgagcttataaacatggttgaatgtgtaaagtagcgagacaagaaaaaaatacctttgagtgaccttgctttattatgtgaaaaatgacaaactggtaggcaggaaagatacatggcttaccatgtatctttcaatttttaggatgtactaaaaatttcaatgcagttaccacatagaagcaagagctagagaagttctgagagaatttttaatctttaggtcagacagcaaggatgtgaggcggtaaagttaaattacactgagttacactgatattcactagtctgatagatacagagagacacaattaccttcactcacacagagtttcctagggctgcaggaacaaagcgccataagctcggtggctcaaaacattcagaaatggttctctcacagactcacggccacggaagctccaagtctgaactcaaggtgttggcagggctgtgttccctctggaggccctacgggagggcccttcctcgtctccagcttctggtggcttcaagtgtcccgtagtttgtgacagccacactccaatctctgcctctgtcttcacatggccttctctgtgcatctgtgtgtgtcaaatctttgtctgtctttgtcttataaggacacttattggatttagggaccacatggataatccaagataacctcatttcaaaacccttaattttataatattggcaagactttttttgtttgtttgtttgtttgttttgcaaataaggccagagtcacaggttccagatggacatatcatttgaggggagacaattcaactcactatatacacaaacacatgtgtgtatctatatagctgtataattgacaccatgaaatcattaatgaagacactgccctttttttgagacagagtctcgctctgtcgcccaggctggagtgcagtggtgcgatctcagctcactgcaacctccacctcccggattcaagcaattctcctgcctcagcgtcccaagtagctgggattacaagcgcccgccaccacgcctggctaatttttgtatttttagtagagacggggtttcaccatgttggccaggctggtctcgatctcttgacctggtgatccacctgccttggcctcccaaagtgctgggattacagatgtaagctacccctcccatataaaacactgccctttctatagttaaactggtcaagtactggacagtttactacaaaagaaacaataaatagataaaaaatgaaacctaggttcaaaagcatgaataatgaatcttgattttaatgatggtttcatcagtgtatgcatatgtccaaacatcaaattgtacattaaatatgtgcagttttttatattgattttacctcaacaaagctgttataaatacaaataataaaaagtgcaaataaattgacaagatacaaatatatttaactatcaaaatgatggagattaaaaaactgtgctgctggccaggtgcggtggctcacgcctgtaatcccagcactttgggaggccaaattgggtggatcacctgaggtcaggagttcgagaccagcctggccaacatggtgaaaccccatctctactaaaaatacaaaaattagctgggcatgatggtgcacacctgtgatcccagctacttgggaggctgaggcaggagaattgcttgaacctgggaggcagaagttgcagtgagctgagatcaggctgctgtactccagcctgggcaacagaatgaggctccatctcaaaaaaactacagacaaacaaaaaacagtgctgttgagtgtgcattgagacaggcattttccagcactgcctttctggaagcagggaggagaggcacagaaatttcagcaagggtaaagtcttcatcctgcaaccatgtttctaggagtctagataattcgatatacaggtaaagtcatagcatttatttaatcatgttaattagttatgttatgtaacatataataagataatattgtatgttaatatataatataaatatattatgctaatacattaatatatacacacttagtccttctatctgttactaaagagagctcacatgacatcagcaaggaaacacagtccttctatctgttactaaagcgagctcacgtgacatcaacaaggaaacacagttagtccttctatctgttactaaagcaagctcacctgacatcaacaagaaaatacacacttagtcctttgtatctgttactcaagcgagctcatgacatcaacaaggaaacatacacttactccttctgttactaaagggagctcatgtgacatcaacaaggaaacacacagttagtccttctatctgttgctaaagggagctcatgtgacatcaacaaggaaacgcactgttagtcctttgtatctgtgagttgtgcatctgccgattcaagcagccaggagtcaaaaatatttgcaaaaaaagccctttaaactgtattgaacatgtacaaagtttttctttttattattctctaaatgacacagtgtaacaacgatttgcatagcatttacattgtagtaggtgttaccagtaatctagagatgatttaaagtatagggagaatgtgcataggctacgctgaatactacaccattgcatatcagggacttgagcgtctagggattctggtatctgggggaggtcctggaaccaatttctcatgaataccgacagatgactgtatgttgtatcttgatgcaatgaataaacaaagcagataacagtaactgacatggggtagaaggtgaggggaaatgaaggggttgctatttacatgtttatatgagatgaacagggcagaccccacagaggggatatttaacagaaactgaacgtaggagaagcagtcctgagaactgtagaccaagagagctcgtggtggccctgggaaggggcttgtcagatctcgtggcccctgggggctggtgactgttagcggctggccaacagccagctgccgccctgaaatctgccactgtcagccggtaacccagcatggcggagtataaagtcaggcctgctgcaaggagatgaaggacccctctgctggtcagcctgggctggagggttctactaccagccttgccaaaagtttctcagaattgcactgcattttaagactttgcctgcccagacccctgcagccccttctcattttcctccacatgcacttctcccaaataatctcttgagtggcaaatactattctggtgtttgctgctccaagaacccagatgtacacagtgttccagcagaggctgcacaaatacagtggccccgaggagcttggcatttttgaggagcatcaaggaggccagtgtggcattcatggaaaggacagagggagagtgggagatgaggtcagaaatgtacttgaagtccttgccgaagaaaaatagttgacttgcttattataaaacccttttagttaaggaagaaataaaaactgttaaccaatggcatctgtatccattacagaatttaaaagaagggcatcatacagccagtaccttacaatcttcccattagcagcattcaacacatctgtctaggtagtaaacctaagtggcccagctctgggccattaaattttgatgtaacccattaaggaaacttacggacttagttcaaagggctgttgccattgtgtctgtgagagcggtgctgcagagtgcattttatgcaaatctcatagattttaatgagtgctcctgcttaataagctagttagaccatttgggcatttacttgagagtgaccacaaatgcctttttctgaaaccatttcacagtgctaacatttaactgaaatagcacttaacacagagccaggcacacagcgagcactaagagtgttacgttactgatgacagggatgaagaacaggagtcttaccagactcctgtgtgtctgtctcgatgctcctgaatgacccagacaaaaagggactagaaactttcttttcaggagtttgtggcttagatccttgtttcaccacaaagcatgagcttgacacagcctggacttgacagcactttccacagggcacttaaaaatacttttacctcctctcttttacctccataaaccatgacaggtctttgctcagcctctgataagcaaaagattagaaaatccctttaaacttcagaaacagagcaatgctcagtcaggcaataaaagctgcagaaattggtcttgaatattatcactgtgtatcaattgaagtcagatgaagagctccacattcatccaaagttcttttcatactaattagatgctcttcaaaggtgtaattaccatttaaaaatgactttggagtgcaggatacacaatagatttttaatgtcttttaatttctttcgatgtttctcatatttcattagtacgttcttattttaccaaagagtcacaggactttcaaggactttccctctcccacagttaaaatgctaaacagaagctaagctcatgtgaaaaacttgtctcaataaccagagaaagactatactaattacaatttggattgcgtggattatcaatttgtccgatactccgtttgcctccaccttgaggagagaactatttccagccccagagtcaagctgcctcattgcacggaagagggagtaaaataagaagcctggtgaagtgcttattgtcacaatttgtggtacagctgacacttagactacatctgcccttgaagctcaacctctttgccgtactcctgtggtgtttcttggcatctggtatcatttcaaaagggtaagaatggcatagagaaggtttctcattgctaagcatggagtaggaatattttagtgaaatgtgtaagttttggggcagaagtaaaaacaccccatctgctcttccacacttcgagagagcggcacacaaagcagcaacttggctctgggcggcagctggctgaggtctcatggtctagaggacagcccctggctttcacatcgtccatgtcttgccatttctctttggataaggcacaaatgtctgaagatatcctccaggcccgaggacctgctcctattctatccagtctcatctttcatgagccactgtgcttcagccactgcttttccttccacccctttgtctttcctttttcccaggtataaggcctttgcactttctaaaccctctaacctggaacactgtttcttctatttatctcaataactccaaccccttctttgtaccatatttcaagcactgctccccaggaaagctctccctgccctctgcccagcccggggcctgtgattatgggtctttgcagcaccaagggcctccccttcactgtacacatgggttgcatgtttctacttgtgcatgcaaatatttgattcaggtctacatcctccagcccccttacagaatatactgctaagggcaggtatggggtctggttttgcccacccctgtgtctccataacatagcacagtgcctgacacagagaaaggagaaggtgctccatgaacatttcctgacccaatccctgaccaaattctctagaagggttgctgtgctctcattgcacagacatgctgcaggagcactctgctgttctccagaattctggctctccatctcaaaatgattctgtgagtggctgcataatgcatcctgaccaaagagtcaggagccctgcaatccttcaacacttctgcaattaatgagctttcagacacagggcaaaccatttaacgtctgtctctatgtcttcttatatgtaaaattagatttttaatatcagctttatttaccttaccgagttattcttctataacaagaacattaagagcctggcttgtattcgtttgagcgagagattgttggtgtgaaaagcattggttataggcagtttcttacttctacacacagtggattcctacacatgtgtttcaaagttgaataacaaagaataatgagggagacatttccagagaactaaaaatacattctaaaattcctagtagtggttaattatgtgctgcctccctcagacccatgaggcaggtgaggccttcaaatgcacgtagcacagggggccaccagccatcctggggatgggaaagatgacccgagcacctcctcttcccggcctgaccactcctctgcccactgctgcagcggccacagcatttccacgtctttaggaagatttgggtggctggaaaccgacatccagatatcgggaaaagcagctctatcttcttgccatctgtggtaaattgtaaatgtgaccccaaatgtttactgtttcctttttctccagcctttgccatgtaattttatagaggtcaccaagtttgactttgggcttagccctgtgaattagtctaggttctccagaaaaacagaaacaataggataggtgtgtatacatataaaataatattgttcataatattatttttatttatttatttttttgagacagatccttgctctgttgccaggctggcatgcagtggcatgatctctgttcacagcaacctccgcctgccgggttcaagtgattctcctgcctcagcctcccgagtagctgcgactacaggcgcccgccaccacgccccgttaatttttgtatttttagtacagacggggtttcaccatgtttgccaggatggtctcgatctcctgaccttgtaatccgcccgccttggtctcccaaaatgctgggattacaggtgtgagccactgcacccggcctataatactattttataaatatataccatatgaaattggctcacgtgattatgaaaacagaagtctcaagatagatatgcatttgcaaactgcagacctaggaaagctgatgggctaattctagtccaaatgctggtgggcttccaagggaaaatctgatgtttcagttcaggtccacaggcagaaacacgaaacacaaaacccaatgcctgggttcacagcagtccaagcagaaagagttccctctgacttgctccattcaggcctccagctgattggctgaggcccagccacatcgggtggggcgggggggacaacctgctatgctcagtctgccaatgtaaatgctaatctcatttgcaatcaccctcccagacacacccagaataatgttgaaacaaatttctgggcaccctgtggcccagtcaagttgacacatacaattaaccatcccaccatgagatttgctgtggccagtgggatgttcacagatgagatgccagcagagccttgaaagactctagacccgtcaggccacccaggtactcacttgggaatgcacgctgatggaggtgctttcgtggccactgtggcaggcaaagggagtgtggtgtcccctgtgctggtcctttgcaggaagtgacacatgccgcttccactcatgattcctgcccgacttgcgtgaacagactgtctgcacaaggtggggtgttccaaccaacttctacagatcttgtaattgatgatttgacatgcactaatcacagggccaaactaatggccaaaggtgtctacatcacccttcagtcccacttttgaggtagcataaaagtcatatcacaaaccctccagccacaaacaaatctgtgacttgtttcctgccgaataagggctgtccctactttgtgacttctcccctctgggttcatggaggcttcgatccatgcttcctgtactcctgcctcctgcccaatcctggcgctgcctgggcagccctgtgtggcatgccaatgctcctttttcttaggaactgtaagaaacaagctcttatttcaaaggcagttgttcctgtctgtgtctatcactttaccatacctgaattaaacaaatcctgaactcaaatcataaaacatggggaatgcaagcatattatatgagcagaaggagtggaatatctgtggacagtcctgatggctcagacccttagttcccacagtgttctgagaatgcccgctgatctctgctgacactgacttccgtgcatggtatttgcctgccgtccctggcacgataggaggttatggttgttgagtgtagtcattccttaaccactttgctatcctgccttattattgtcaataaatactataacatatgctaaattttagcattctgtgaaatgagagagggtgtatgatattgtttctaaggcagaaaccgagacagcaagatcttactgcaccattctgtggcttcccagcaccaagtcattctgatgacccaggtctcacactggcaccttcagaaaaccatggtgccaggaagttaaaatcttatttgaatccaaataaaagacatattcagactcctagtgactcatgacctgaagtctaaggtttattcggaattggcggagatagcactggtaaatatatatacttttttaaaatgaagggtccaaaaatacgacatttccctaagcattaagtcagactgagaaatttgtaccagtgatttggagcctggaggtaatgaggcaaaaacttaatgagcttattccgggacccccacctgaggcaagacctcaaagccttaaggatacaaatttccagtggcggcttgttgacaataacagaaaaggcggaatcatgagcaagccggctgtctgcccaccgaagagagtgctcgcaaatgcttggcaacactccccacctgtgtgactccctctttcagcctggagggctttccacgtttccagtgtgcatcctcttgacattaaagacattatcccagggcgcttaccctgagcaaagcttcctcttctcagctcctacagtttggctgatgctgctcaagagtcccccacagtcctggcatctggtttacttctgggaggcatctgccctgctgaaagacaggaggcggcggaaagaacagatagaacaggatccccggggctctgattcttaagggaaagcaacatgaccttggctggtggatcggctaacaagaggcttaaatagaggccctgttgctccctacaagaagtttggacacactgtgatgaggcatttgaaagaaaaccttccgagtacagtgggaatctgtatcataaacaaaagaagcctttggtatgccctgtgtgccccctgcacagtgcactcagtacataactacagactgttctgcaaaaaaatgaaacaactggaatttttaatatcatgtctgagatttcctgtgagaacatggtgtacacgttctactaagttcaaggtgcgattttcccctaattgttttcaatagttccttccactgttagcatctttcagaaaaatatcagcacattgctttccctagagggaatagaagagaataaaatcccatgatttaatctttaaaaagttgagaaacaaaagtcaaaaacatccaaatttaatgctgccttttctagcttatgcatgttacgttaatatctaaatgatgtccagaagtatttacttgtgtcatatttacagaactggctgacagactttaagaaacttgttttggcttttgttattaatgttctcaggaacacttgacatgaaagttctggttttctataaaacagagttttgacatttttggagaaacttaaaataggtctactaggttctggtgaattcagaatattcagaggacataaagcatgactgatgaggagcataggattttgtgcctcagagcacttaccattgattaaaggcctttaggttggattctgacctggagatagtgtccactgacttcacggcagtctctcttctgcaaataggggtactgcttttcctcatccttatggaaatgatatagtgggatgtgaaaacatgtggtttcccccttgaagttctaaacattccaaaagtgtcatttactcactagatccttaatagatcttccttctaatatggattttttaaaaaaaatttagatcactcttgctttcatgatttgagaaggtgttacttagagaaataaggcaaaaggaaaactttaagattgacatttgtctagggtgcctccaacatttctagaacattagatagattatcactcgatctcttgttttgaaagcaaattggtttctagaagacccactttgatgatgagacctgtggaggttttcatcacagatgtttatttacatggagaagaacccctgaacatggtgaccagatgaaaggcagctcagggctgagctctcgggactcagctctgccatcagccaccagccacattttcctctgtgtttatgaaaatgatgcacccttacactcaatgctacagttcttgagtcagcattgtgcaagttgattatccaaattggtccattcttgtcatacccaactaaatcagagaagaggggtctgagtaaaaggcactcagggtacataacgtcactctagaaatgctgttgtctgcaagtcccgtggctgaaactgcctgttgtaaccagagaccactttcatctgtagcaggtgagataacaactgcaaatcaaggactagttttgcccaccacagtcacccaccaatcagaccttaccagcccccaaaactttgctaatatcaaagaactttctcacaggaccacaaaggaacagtcctctttttccaccttcggaccaccctgtctgcctctatattgtgaattgcaattctttcttcctaaatattaaatttagagattcagctctacatttttaatttgctttagagaaggtcaagcagacacttgccaaaccctgtggtttctttgtcactgtgtggctgggttcgttcctcttcattttgtcctcactcacagcttcctttgtctgaagcttccttctcactgacccgcttacctcaggtggcttctcttctgttgtatcttaagaggtagctgctgcaagtctttcttaattcactggggaataatggcagcctctccaggccttctgtgtcaagacctcagtcctggtttgctgcaaagctcctcacccagccttgccagatagtcttgttttgctttcttcttctagtcttcaaatcccactctgattttgagattcttttgttaaagcccagcagcaaggatggtggagcgtgcattgggtgtttgggtggcaggacagctggtttctagtcttgggttggaaaataccaagtgatttggctttggggaaatgactcccctttttggtgtgagggattatttctagtaaattgtaatgaagagatttcatatcagtcaacagaagtggttctgagcatgatcactaagtgggagcgggagtcacaggtcctcaaggcttatctcctccagggcagttttatctctgccccaggaaggaagtacgtggtaatatatttcctgttctggctgctggttggaagttgtgagggtgattgccaaatgaattctctatatgtaatccagatatcaactggcatttcctgctcctgtgatctagataagagaggcctagcaagcaggccacttgccgtagatgccgagtttatggtccgcatcacttttttatgtaggctgaacctggcccacatgacgtctgcccagatataaaattccacctcttccttgatttccacctaaaatgtcactcacctgaggcaaggatccatggagatttgaaggagacatgtgagagtacgcttcagaaaggcacgtgctcctagtaaatgttaaatactgagattcttaaatgtttcctcatgcccaagtctgtatgttctacatccttgagagggaacctaataaaaggagttatttttcttgacaaatggagtttataaaaaggactttgagatctttcaaaatatgatctaatataagaatcatttatttttggaaacacatttgtttattcattcacagttacattcattcattctaggcttttttggtttggcctctacagaagaaattataaaactggttcagtactgccccccatcagatacactaattccccaaataacagaagccaatgatttctgcatgtgaattgtccagcttttaaagtcagccatttggccatctgtggccatttggtgatgtgttacttgtgtatggactgccagtgttactagtgtggtctcgatggaaggtagctcttcaaggaagtagtaaaagccaaactgcacaaagcaaatcctgtagctgacaacaatgtgcccaggcttttccagatttgctctagttattccaataagcactattcaaacttataaacagatgaaaggagaaaagaaaggagcctttaaagacaaaaagagggcttctttctgccagtgaaacatttctcaggtaagatcacatcatctgcaatatggcttgcaaatgtgtgtttaagataatttttggaacagcctagaccaaccagttaaagtgactaggggttaaactccaggaggcacaacagaatatatatgtctatatatatatatacatatcttcacaccaatacacacaaaaaccttttatctctttatttgttatttcacaaaccctaataactctaagctgcataatatctctcttaatgatataggcgttaagaagaaactgcttaggcagatagtgagggtatgggaatcctcataggttttgctttttaatgaaaagcagccccaaaatcattgtctaacaaagatcagcctgtaagatggagctgcagacatagaaaagccagcggcaagcttgcatgggtgaagggcagcaggaaaaagctacggggactaggcatgttcaaaacggaggctccatctcccctttcctttgccaaccacgtgtacaggaaggagcagacaagatggcaccagtcaagtggaaagtccatttgcatagtaagattcggatggggtggccagccttctccgcatgccgtgtaaacctatgtaagctctagggaaatcagacaccgcctcctcaagcctgcctaaaaaatcctgcacactccttgccggctggtcttccctttgggaaactctctctctctctctcactagagggagactattctcctttctctttcttttgcctattaaacatctgctcctaaactcttcctgtgtgtttgtgttctaaatcttcctggcacaagaccatgaaccctgggtatttacaccagataactttccatatgatttgttgagccttatatgctaggcactgagttaggtactgactacaaagagttgaatttgttgtagttttctaaaaacctcatataatttcctttgagcttgacccttcctgttgaagtccagctgacattttggtgagtgtttctctgtggactgattcaccccgtagataactaggcaggaggcctggacagagcttgggaaggctctgcctgcagtgggtgtgcaatgggaggaaggttttccccatgagcctcttcacttagggtccatttgaacgggacgtttatctcccagcccatcttcagggggaatctgccgttggtgagtggaaacaaagggcaggagttggggtctcaccactgtattgtccataccaccaccatctctggagccaaattcccaatctgcttaaggcttcgtctcatattgcacgtcccccacacactgatcttccaggtctgtgaagcattgaaacacttttccatttcagggctgtttgtgctgtttcctcagcttcaatttttccccttcctgaagtttcagggaagccctctccgtttagacctgaccatcagagaggcatttcctgcccctctccgtcagtcccatttttgtttttacatagtgcgttcatcagtttttatttattatttgtctattcagcactttttttttctgtttgtcctgttttacttttccattagaatataagcaatgagaggacagggctgggtcaggcttgtttgctattatatttgcaatacttatcttgtaggcaattaatgaatgtaaataaattaccttcaatgctatgaattataatagttgcatttgcttcttcacacaagtgtcccacgattaccataagcttgtatgtgtgtttaggttctttttttcatagcatttcccataagatgattatctgagtcaatgcattgcttagggttcaccggagaaacatgtgtgtgtgtgcgcatgtgtgtacatgtctgtgtaggagggtgagacagacagagatttcattgaaggaattagttcacatgattatggagactgcaggaccagaatctgtaggatagaccagcaggctgcagacccaggaaagggcccacgttgcacttctgaaggccgccggctggcagcattccctcaggattgcgggaggtcagtttttgttctattcaggccttcaactgattggatgaggcccacccacattacagaaagcaatcagctttactcaaagtcccctgactgaagtattaatcatattccaacacaccctcacagaaatggaatatataacaatatgtgactagaacagtgtttgaccacctatctgggtgcgatggcctgggcaagtggtcacataaagtgagccagaatagacaacctgaaactttaataccaacaagcttgtcctgaggccaggacacatcttcatccaggtggggtgaggggcttgccatgttcccacaagacctgtgattttcagcaatccttaagtctctgaggttcagatgccttgtatatataacaggcagattagtctaaatccagagattgcaaactgtagcccccaggccagatccagcccctcctgcttatatgtggcaacacaggctgagaatggtttttatggatgaacatttgggattaatttggttctagggaactaactttgaacttccaataagcaaaatgttatctcctcctcaaaggattccatttatctcttttgtgggcctgtattatcaaaacaaacaaaaactaaatgattatgttatagtttgaattttgtcaagaaaaatgttgtggaaatttattttatctcttcttttattagtattgacataatatctttgatttttgtctcttggctcaggaagcctaaaacatttacaatctgatcctttatagaaaaagtttgccaacccttggtccaaatgcctcatgttttcaagtcatgacattctgtgtgcctaggttctcgtggaatgtaacacgctacagggatcagccgtttggtgagtctgtggtaaaccttttattgaaagagcagtgtcttagatgaaatgagctttgaacgatttggggaagtagagcgatggcgggtggggaaagactttctgctgcagacaaaggttccctacatgtctgccctgatcctgcacctttgtgccctctgaacaatgaagacaagccaggcaaaccccagtgatgctttaacctgcagctcgggacagcctccactctgtctcagactcgcccggctgtgttccggcttctgcctggggttcagccacgggctcacctgtccttgcagcagaacctctgtctttggagttggtgctggtctttgagtcatttctttggctgtgactcagtcaagcctgattggattcagaccagcatgaagggtcctactgctcctaattctccctcccagctgggcctgcttcaaatcctccagcattcagcccagcaaaccatgatctagcccaacactccctctgggcatgtgcctctccaagatgccgcaggcagaggaagctgaaaggctgagtgagcctcccatttgaacgtctgctttttctagggcaagctgttcttttccataccttgtttgtaagacagagaaggggtctgcctgaattgtaccgggcactgtgttagcgctccatgcagatgggccaggttgctttcactcttctgagattaatagttgcacttcataatcacagagccatttcacagtttgataccaagcacccatacagacaatatttggagtcagtgaagagagtttttgcaaatgtcttagaagataaattagcgacagtgtgagagatcagtttgcactgtgcttcagttttccattgcaggctcttactaacctgatcccattacagctttgaattaggaaataagcctgaggcacaaatagctgtgaaagctttgtttggttgagggttttggaattcgaatgcttaacaaaagtttgcaaaatcctgtgaaatttctttcttttcttttcttttttttttttgcatttcatttaccttgtcttatttgttctttctgttctctctagtattattttcaaatgcaattaagaccacctagttctgtcattggctggaattcccaggaatcagtgaccctttgatagaggtatgtgtgccctgcccaggggacccagtgggcagcatgaggctcccctctcccctttctcaaccagcctggagtatgttggaaataaaacagagagctaaagaatgtggagaaactgccggcctgaacccaactagagtggaaaacatccaaggaaggccggtggcgctgggaagtgagctgagtctcttgggttctaaaaagctggaaggattggagcaggaacccagccccacactttccagcttgttttgtcgacaggaatgttttgctggaggaaaggcctgaggagaagtttgattttctgtaactcaagtagatttggaacattgctcttcctttccattgcaaacagttttttcttccaatgctgatattcgttgagatgtttaactcctgtgtatttaaaaaagaagggtataaatacattcagatactaaaaacattatttgcagttaatttaaatatatattagagtaataaaaattcggaaagtgattgtaacgcttacttcacgtgtggatttaactatgtgaattgatcagaagctgagcttaaatggcaatcacttcctgagctttggttgggtgtctcttactccctagagcacggttggttccttgctttcagttcagattgatttgtgcaaaagtgaactccttggcttccccgtcaagtgagcccccacacaactactttattttttcggcgataccatcgttctttcagttacctggactcagaaactggagctgcttgtcatttctttctgtgctctgtcttccacgtctttacatttccaaatcatgtgaatgtatccctagtgccccactggtgtttccatctccatgaccccaccctccacccttattccactggtgtttccatctccatgaccccaccctttacctcttactccaaatggtgttggatgttccgtgaccccaagatcggtgtgttatccgagtggtgtttcgatctccacgacccgaacctgccagcctggtaccaatgggtttccagtgccatggccccgaccccaccctgtacctcgtagtgaagtggtgtttcgatcagcatgaccccaccctatacctcttattcccctggtgttaccatgtccataaccccaccctccacccttattccactggtgtttccatctccgtgaccccaccctccacccttattcctcactgattcagtaatcatgacttcacgctgaagtcatgacttccatgactgcacgctttggtgttgcttttggtgcttctctcacatattttaaacattgatccacagagctttcttacacattacacattattttcctcattttatagatgaatcaactgagacaccaaggaactgatggacttgtccaattcacacagatagttaaggattgaggccaagacctctagcctggaggtacctagcacctggagagcagcctgcctggcttgctgttgccagtagtttctcctcttcaatgggtcatgcagaaccttggcctcgttcactgctcatagccaggagctatggacaaaggcattctattacctacagggataagtccgtttgttcccagaccaaactgagagtcgggctgcttattctcgtggcccaataatgagatgcagataaactgggaaagaagagagcttatttctgtaaccgggtacagggagaaggcctggaaaatactgccagactaaccaaaaattacaaggtttacagagcttatataccttttaagctatatgtctgtgtgtacttgtgcattcgtgtaaagacataagtgattaacttactctaatctgtaactaagatctgagttttgaagcccttcctctgcagcctcagtaaattgacttaatctagacgggtctaggtaccgggggtgattacatttatcctgtctcctgctaaatcatggaggtttggggagttcctttagacccccaataaaacatttttgtggaggtctggggagtttcttcagccccccaataacaagttgtttaatcctaaacaggtcctgttaagaattccttcattattttgtcgcacttcaagacctgggagaggcctgggcaaaactcctggtgggctttggttacattccagcctttgtataaggacactggctctctcagctttcagtatgtagctcaacactcagtcagtgctgagacagttgttatggaggcctgcctgttcagctgttagtgacacctggcctgccacaaaaatctccttggttggcatgaaatagcctctccaatctgtctaattgacttatctggtcttctatcactcttttcagctcctcagaaactctgctcccggcagatgagactaatttttgtccttcagctccacctgcaccaatcacctccaaatttctgctcatacagtaccctctgcgtagatgcctttcttcttcatgctcgagtcccttattttcatggagcctttcctgtctgctcacacagattgtgtgctcctgtgtgacaagagtggtcgattccgattgatttgtccagaattgaactccttgttttcctcatcgcgtggcccccacttgttggaaacctgaaaagactacatttcccagactcccttatgggtgatgttgggagcctatgaccgtgttctgaccagtgctgtgtagatggaacgctggccacttccagagttgaccataagacactactctcttctttcctcctgtgggaatccaggaacccacatgttccaggtggcagagttatagtatggaagcagctcctatctctgagttaccactcggaggagaccaaccaagtagggccactgaagggacaatgacttcgaatgagaaagacgtaagttttattttaagccactgagattttgggttgcttgttatagtggccagcaaacattgctctgactaatttggcctgcctgcctggtttgatatatctctccacctggattttagagttaatgattggcatgccatttattttttacctttctcccttccctatttcttttctcattttctcctttattttcttcattccccatttaattttttgttttctcgttttttctccccagcatctttgagggccctatttaatcttaattgagagatcaccagggagacaaattctactaattgcaaaaattgaataaaaaatggtctgagctttcaagaaagtgcctgtttagtaagaattttatagtctagtagttgctaacaatttaagctgtttgtccctccattactcagttgtccgggcaaaacaaatggtcagagaccagtcactgaatgcggattagggctttccaggttctcaggacttcactggtcttgcatgatgttgtaggaatggtgaggtggggccaaaatttactttctgatcaaacagcccatgtgttcattggttaggtaataaatatgattaagcctctacagccctataggctgcagcacagaggaattacaggtaatcttgatttagagagtgtgtttgggtaagtgttccagcttatttgcatagcaaagggctctgctggggccactgactttgttctctgtgaactcccaattctctgggaagcagataatatagattcctctgctcttatcaatttccagttgcattcttccaaagcaccaggagatttgtgtttggccatgatttcagttggcatactttggccctggggtgatttctcatcattatgatgtcagcctccattttcatgccaatgatacagttatacctgtttttggtttttgacatcccttccctttctttgtctggcaggcattaaatcattaatgtttcaaaatcacatacagctgaaactttgtaaaacagcatttctagtaatgagctccttaaaattgcagagacaatccagtcctctctttttcttggcctccgctgacctccaatttcacttcaaacgaggatgcagggggttatctttgattgataattatttttcctgatctaagatgtatgaaaacctgtcttttatcatgcaaaccttgctagaatgcaggtatttctctccattactaatgcaggaagattttcgtcatgatttatgtctttcagattaaattactgggaaacatggcccttcctgaaggctggctatctctacagcaaaaatcgctcctttgctttgacagtcatgatacatcattgcacctctggctaattagcagcttcttccctggtcttatttttccactatggggatgtttgcaaaactttttttcatgtcaagcttccattttaccttaccaagcacttcacctaactgctgaagtttatcattcaccagggagacactgctggaaacccccaggaatcccagagcgactgtcactgtatgatttaggagacagtcacggaaaatgagaagaagaacgtaagcagctaaccatcatgacacgcacagaactcacatacatactcggtggcagacacagcggtgccctcggattagctcgtttaattcttgctacaacttcgtgagctacaatcggttgagaaatctggttaagaatttagagattaaataacttgctaaaggccatagagctaaaaagcagcagatatgggttcaaatacaggcatgtctgactttggtcactgtaagggagtagctgattctgttctaaccccaatgccaacaccaacagaaatgctcacttaaaccatggaaagatcattagacataactaacaacgggggaagtgcagatgtattttgtgatgtgcaaccacagatttcagaagccactcctattaatatcttatttgtcatgagtataaaacttctaagaatataagcacattattatattgattgtcacacagagcacaatgcagaatttagtggggatgaatgtaattaatctatgaggctacgccatgccatgcctgtgactggtggtggggggtcaggagtctgaacaaactgtgtgctaaaaatggggagagagagaaggaaggaaagagagaaagagagagagaggtgggtacttgtaatgtacagagtacaggtctggccttcccctcacccctcagggccccttaagtgaaggggaatggggaagtgagaatgaatgtcttcaagaacccaccaggtagcaaatgggaggaatgaagggccagggccagggccagggcctcccccactgcatgggaaaccacacttgtcatgggaggagcttctcctttatggatactttgagactctgcattattttctaattcaggataataaatccagctccctcatgactttccctcatattatctgcctttcgtaatcccttgtgtcatgttacatgtcacttctcttcctaatctccatgctccagaaccccccaggaattgtcattcgtgaatccttggttaattaagtcttttaatgtctttatttttatatctcttttctatttcataggaatagaacataagatattatatatatgtaatatatataaaattatgctcacacacatgcacacacatgttgtactaaatgtaagaagcactttgacctctgcaattgaaaagtactttttgaggtgacagaattttctgttaggctttgctgagcctattcacacgtctgaggtgacctatttttctgactgtgtctcaacactggcactgatatgtttttccaaggatttttcattgatatttaaaaactattgttacactccctttctgctttagtaaacagatgataatacaaactttccttactatttcaagtccaccattacaacttactctcctatactttaaatgtaggtttttggctgattctaccatattgtgttcccttaagtaagttctggattaattttttttcatttgcttttttctcataaatgtacaatgagaatgagcagctgcagggcttcccgggcatcaaagcatctcagccatcaaaagtcaccatattctccaagagtgacgtcttctcagtcaaagtcaccatattctcgaagagtgacatcgtctttcagtcacctccttgtgcttcaccccaccacactcctgccttctttagcacctgtgtttggacggccctcatggcctccatattctccaagagtgacgtcgccttctcagtcaaagtcaccatattctccaacagcgacgtcgtcttctcagtcacatccttgtgcttcaccccgccacgttcccgccttcgttagcatctgttcaccccgccacattcccgccttcgtcagcatctgttcaccccgccacgctcccgcctatgttagcatctcttcaccccgccgcgctcctgccttcctaagcatctgttcaccccgccgcgctcccgccttcgtcagcatctgttcaccccgccacgctcccgccttcgttagcgtctcttcaccccgccgcgctcccgccttcctgagcgtctgttcaccccgccgctctcccgccttcgtcagcgtctgttcaccccgccgcgctcccgccttcgtcagcgtctgttcaccccgccgcgctcccgccttcgtcagcgtctgttcaccccgccgcgctcccgccttcgtcagcgtctgttcaccccgccgcgctcccgccttcgtcagcgtctgttcaccccgccgcgctcccgccttcgtcagcgtctgttcaccccgccgcgctcccgccttcgtcagcgtctgttcaccccgccgcgctcccgccttccttagcgtctgttcaccccgccgcgctcccgccttccttagcgtctgttcaccccgccccgctcccgccttcgtcagcgtctgttcaccccgccccgctcccgccttcgtcagcgtctcttcaccccgccgcgctcccgccttcgtcagcgtctcttcaccccgccgcgctcccgccttcgtcagcgtctcttcaccccgccgcgctcccgccttcgtcagcgtctcttcaccccgccgcgctcccgccttcgtcagcgtctcttcaccccgccgcgctcccgccttcgtcagcgtctcttcaccccgccgcgctcccgccttcgtcagcgtctgttcaccccgccgcgctcccgccttcgtcagcgtctgttcaccccgccgcgctcccgccttccttagcgtctgttcaccccgccgcgctcccgccttcctcagcgtctgttcaccccgcggcgctcccgccttccttagcatctgttcaccccaccgcgctcctgccttcgttagcatgtggcttgtctggacggccctcagcctccttccatttcagcattgtcatcatcacagtgctgtgctacttgccttatttttctccttgacgtctcccttggctgatttttcttctctctgaatcatttaaacacatttcgtcccccctatttgatcctattgtgtctcttcctctacttgaaaaattctccctaaaatgggtcctcaggacttctctcttgagtctatatattgtctgtgatttttgcactttatgtatatgcacctctgataaagaatttcctttgaagtctaatcagcagcgtctccttatgcagtgcaccctctttcttcatctggggatggagtgctcctccacagtaagctatggtgtctggctatccagcagctggcttcaagcatgggactctgaggggactcctctttggtcttcccattatttcacatatttacacagtgcagagggattcttcctggtccacgggtcagagaggagaattctagtgtactgcatctagtcctttcactcgtatccaggttcacctgggctgctaacccacttcctaattgacataaatggatcctggctgtgctcatggctagctgcgcctttcacctgtgaaatttcgttacgggagtttgtgaagtagccatttctcggaggcaaagacagaattgtcccagaaatacagaacacttgttattagacgggcttttacaatttaattcttggaatgttgctctccattgaagaatagttaatcattggtagaaacatgtcagtcgcacactgcagcttatatacagtcatgtgtagcttaatgaccaggatttgctctgagaagtgtgtctttaggtgatttcatcattgtgcaaacatcatagagtgtccttgcctaaaccaggatggtagagcctctcacacacctaatctgtatgataaagtctattgctcctaagctacaagcagcagggtactgtactgaatactgtaggcagttgtaacacaatggtaagtatttgtgtatctaaacatagaaaaggtacaataaaaatacagtactataatcttatgagaccactgttgtacatgtggtctgtcatcgactgagacgtcatggggcacatgaccatattacatgttttagaatcaagattagactctaagctttccaacaaccctattgtcctgttacttgtttcagggctcaaaaacattgttgaggctgtggcatgttttgtgctatataatctgctcatattccctgagatttctcttgtgaaaaactgtccatggctttgttcttggacatgctgagccacaatgtggaactttcccataatttactatgccagtcactgcagcccttctgagaggctggagagaactctgtttctttttctgttgttttttttttctattgatattttgttaaaaatgtaggtagactttcccatcttaaactgatagcaaaaagaagaggcaaataacagaaggaactatcaaccactgttgttgtttccattcatgcttattctttatgaaatgtttctgtgcatggagggaaaaaggctctgagaatacagctagaacccaccgtgcccacggagacactggctgtttcctggcattctctttggtggtgggaagcatcttttcccagactcacctatggtgacacagactcaagtttgaaagcatcagcactgtttctgtcccaacacctgcctttttcgggaatcacacatattgttagtgttgagataacacattttgaacctttatttttattttctgtgtgcctttattgcccagaaagtgtgtgtgtgagtgtctgtctgtctgtctgtctacggtgaggggaggtgggaagagggagagggcaaggaaggagaaggaagcaaagacacttaagaaacatcacttgctttgaagttagtgcaaaactaatattttgggtaaaaagcttttcctttgccagagcaaatatttgattgcttcaattcttctaaaatattctgttttcttcttgtttcagcatctagtaaattttgggcagtcctatttagcaaaagagaatgaatccaatcagcatgtctcagaaggtacagcaatagggttggaggaaaaataatgtatgagaaaagtgaactgcagtgtgcttttaactcatttataacagttaatcaaactaaatatctgactggcaaattaaccactttgaagatattttgtcatgagagtgatggtggcgaaaggtacaggtgataccttgtatgtgccagtcagccatttatcttactggccagccagaaaatggctttcattagttatatagctttatggaactaaactcatttctttgaggtgtgatggcacaataaagagaatattcccatgcgactgaggccaatcttctgttttgcccaataggccactttccgagtgatagcattttcaaaatttgaggtttgtagggccagtcgctgaggccgatgactgcaggcaggtcccttttcctttgtttgggtcagtggccctgaggtgagctgtgctgctctggttcttgtttggtttatacacgatggcatcctctgttcaggtctaaggtttcatgtcttcaccagtagaaacaggataccttctcaatttttaaattagaactgcaagtttaattctttatcaaaccatctaaatatgataaccccaaccagtaattaaaattcccccagtttaaaaattgtattcatccctgagaggtctgagaaacaaaatttaaaacaaaaataaacaatttaaaatttaaaagggagctctcagattctgtctgtctaagcttctcattttaaaggtgaaaacaatacagttatcacgtacagctctaaaggttctgttgtcagtgttttatatgtgtatgatgtggggtgtgtggtgtgtgtgtgtgtgtgtgtgtgtgtgtgtatgaactgattcttgtaagctgatgaggtcgttatgattatttatttatttatttatttatttatttatttatttatttgagacggagtctcgctctgtcgcccaggctggagtgcagtggtgcgatctcggctcaatgcaagctccgcctcccgggttcatgccattctcctgcctcagcctcccgagtagctgggattacaggcgccggacaccaggcccagctaattttttgtatttttaatagagacggggtttcaccgtgttagccaagatggtctcgatctcctgacctcatgatccgcccgtctcggcctcccgaagtgctgggattacaggcgtgagccaccgcgcccggccgaggtcgttatgattattattatccctgctttacaggtaagaaacgtaggcctctaggggttcatttaccttccgtggtcaaagatctagcagtggcagcagcagacgcaagcgcaaccaggtgtcctctggaggactgaggtctccaccaccttggaggaaatcaagacgcagaggaaggaaggctcttgccaaggccatacagctgctggtggcagcaattgcactgaatattgaaaatacataaagagcaaaatttaaataaatagcttcatacgggacagaccataattgatcttacttttctcttatttatcaaggtttagtttgttttccaattttgctgttagagaaaaatgtccagacatcttttaaacaagtcttggcctaaatttgtttagataagatttctaaaaggaataataataataataattatatatatatatatatatagagagagagagagagagatgaatcctcactctgttggccaggctggagggcagtggtgtgatctcggctcactgcaacctcggcctcccgggttcaaacgattatcccacctcagcctcccaagtagctggattacaggcatgcaccccatgcccgagccaccatgcccaggcaggaatagtaatttatgtccaaagttatacagagtcttaccaagaatgattttactaaaattcacttttactagcacaagaatgagcatttcactgtacacaatccgtattaaatacatttattaaaaataactgaacaagcaataatttgagaggcatttcaaaatttgctgtaatctgtgtttaagtggttgtgagattaatttttgtttttccaagaatttttaattcaatacctttattcgtttttcttttctttcaagtttttaaaaaataaatcttatctattaaaatattaactctgtgacagtcacattctttgattttcattctctccaaatactcttctattcacccattccctgactaggggtagagaggtcacttgtatgtgatgtcagcacctctgctgtccttcctaatgtcttgctccttggacttgtggactcacatggatcttggattatcggaatgacaggccaagaaggtaggatgtgggacgttatcttggacagcttccagtagttccacttgtttacacactctttctttttgttccttatgctgctattatatttttgaaaaacttgtacttcatactgtaagtaagtatttggatgtcaagtctattgcccagtagggagaaacaatgacctatcggatatatgtgaatatatacatatatgtatacatatatgtatttatattgataaaggaaatatctgtgtgtatatgcatttgtgtatatatacatacaaataaatataaaataaaaatgaatatatatcttatgcaaacatatattttataatctatcgatatattaatctaaaattattatcaattatatatcataatatatactgtataagttaggtatattaattataaatgattactatttaataaaattatctagatgatatggtttggctctgtccccacccaaatctaatgttgaattttagttcccataatccccatgtgtggtgggagggacctggtgggaggtaactgaatcatggggcagttacccttatgctgctgttctcaagatagtgagtaaattctcctgaaacctgatggttgtataaggggctttcccctctttgctaggcacttctctctcctacccctttgtgaagaaggacgtgcttgcttccccttcagccatgattgtaagtttcctgaggccttcccagccatgtgagtcaattaagacaaaaactttccttataaattacccagtcttgagtatgttttcaaagcagcatgagaatggactaatacactagaatataaaaatatgaataaatttaataacaatatacaacaataatcatgtatacatacatatctaagtgtaaacataaatatacagtattatttgggaaaacctctcaaaccgtgtttcttctgctctgataccacacatcaacaatcaacatagaagattctgggatcccaaatgtgtgaggattttttcccactggcaagcaaacaatcaattctgcagcagacaccaggtgagtgtccttcaattctattccaacattatctacctggagacagcatcagattccacatgttgggggctcagtccccaagactgccctccaccctgacactagtctccagtctgggcttctggaacttctgattaatgggcttcaatttggggttcccatgactccctctttggctcaattaatttgctggaatggctcacagaaccagggaaacacttacttgcatttatcagattattataaaggatattgcaaaggacacagatgaagagatgcgtaagttgaggtatgggggaagaagcaaggagcttccatgctttttctgggcatcaccctctaggaacctccctgtgtccaggtatgtggaaatgcccccaaccttgtccttttggggttttatggaggcttcatgacataggcatgactgattaaaccattggccattggtgctcaacttgaccttcaacccctctcccctcccaggaggttgatgggtgggtctggaagtcccaaccctctaatccttccttggtctttttggtgaccagccctaccttgaagctattagtcaacattagcatgcaaaaagacagcacttagagattctaaggacgttaggagttgtatctcaggcagggggaaaacagaaggaaggccaaatatatatttcacagcatcacaagtgcatatgatataggagttgaaaagaaattacttagtcagttagtgagggtacagaagtcctcagtaaagttttccttttaatcaaaagtggcccccaaatcattatttttctaacaaagagcagcctgtaaaatcaagctacagacataaacaagcaagctgaaagcttgcatgggtgaatgccagcaattgtgcccatagttatgtactacctgggctaggcatgttcaaaatggtggctccattttctctttttgccagccactctattgtaaggagcagacaagatggtgaaggtcaagtggaaagtccatttgcataataagattagggtgggactaccagcctttcccgcctgctatgtaaacgtcccacctggtcaagccaatccatgagccctagggaaagcagacaccacctcctcaagcctgcctataaactctgctgtggtctgacactgtccccctttctgacacctctctctcacaaggagctgctctcctctctcctttcttctgcctattaaactttccactccttaacccacccacatgtgttcatgtccttaattttctcagcacaagaggatgagcccctggtacttaccactgacaatgatgctgcttcacatataatgtaaatatatatttaataacctacatatttctacatatattgatgtgtacacacacacacacacacacacacacacactcaaatgtgggccattacagatgttaatttctaaaagaatggtgcagacaaatgccgcgattgaggagagagtgctttgagcttggggctggacaggcttagcctggcacgagcacttgcagccttgcactgaggaatgggaagtccccacagactgaaaatcttcagggaggacatccttaataagttcagccaacttttttctgagcatatctttcccaccaaaaatcactttccaaaggttcgtgtcaggtaacgaacacagcacgttctcgagagaataagctagtttgaattagagggttaatttaggtgaacagtggcaaaattgtggcaatagtgagttgcgttttgaagtgttgtaatttttgacttgttaaataggttttaacctttggcaggagtaaagagccattggaggtttctctggaggagactgacctgcacaaattatttttgtaataaagaattacattagaaatagaagttagatggactgagacaaaaacttgagacagggaagctaaaggagagtgggtggcattatcctgggtgaaccgcaaggagggtgtcggggtggctgtgtgaggcatccctagaggagggctgggagctgactgcatgctgggattcagatgggaagagtcagatgactccatgttttataaacatgtagttgacagaaatagcacagtcaagaaggaactttggctttgaggaaaatacatgatctattttgtgtaggcaaagcagagaatcaggtgaaaagctatcaccttcttttaacttgttaacaactcttataaaatctgccagggacagggacataaatgatggtaatacacataattattatggggtttcaggaatctgtgtttctcttttccctattaattctgaaatatggcgaggctgtgttcagatttcaaagaagcactaattctctcaggtcattctttacaatctgcggccatatttttccactagagcaaaccatttcctttttaccggctttttccctccctccctcactccctttctccctttctttttttctctctttcttttcatctttctctttctcctttcttttcttttggtcttttttctctttctttctctttcccttctttccttccttcttccttgattccttccttccttccttcctcccttccttcttttttctctttcttctttagaatacattcaactctggtttacacgccctaagagttaatagtatttaaaagttgatacccttatttagtcaaaataacagttgggactggtttagtttctaacacaggtttccctcttgtctccattggcaatattggttgacaaattgtcatagtgcctaaactaatgaaatagctctttatgattttggaggagacaccctacagaatttgtatcaaatgaattgtaactcctaaaggtttactgtgctttttggaggtgctatataaatgccagagcctcagggcaagatcacttatcatctaaggtgggctagggagatccttcagctattcctgcttcaggagaaaggaagctggcttgaataacccacacaccaaggttcatagttgattattatgtcatatctgaagatagaatgttttggttttatttgctagagtaaataatcaagcaacaaaagtgtgaaggggactccctttaattgcttccaccctctaccatagacctcttaataagacaagaacataaaaaagtaaacaatattttaatttcaaatttctggttaacaaaaaaatattggaaattcttactattgggaagagaatttctacttccatgtcctggaaacataacaaaggcaaaaaaagaatatttgggacaatgtttaagttttacatttttccaacttaataatgaagcggtgacattgtctggtgtaaatacctggggttcattgtctcatgccaagaaaatttagggcacagacactcatggaggagtttaggagtagaggtttaataggcagaaaaaagagaaaggagaatagctctctctctggtgagagagacaagggcttctgaaagggaaagactggccaatggcagagtgcgccaagttttatagacaggtttgagaaggtagtgtccgacttatgtaggacccacagattggttatatcaggtgtgaggtttacatagcatgaggagaaggctggccgccccaccctaacattattatgcaattgggctttccacttgaccggtgccatcttgtctgctccttcctgtacacgtggttggcaaagggaaagggagatggagctgccattttgaacatgcctagtccccgtaggtttttcctgctgaccttcacccgtgcaagcttgcagctggcttgtctatgtctgcagctccatcttacaggctgctcttcttagaaagtgactttgggtctccttttcactaaaaaagaaaacctttaccgagcacttttgtaccctcactatctgctcaagtaatttctttttaactcctatatcaacaacaggactaaacaatgaattgtaacattttaaagtcagggttgattaaggtataatttacatatggtgacgggcttcttgatatactaccccaaaatacgttaccttggcacttggggaaatggcagatgcagaaaggtcactctcacctttccttgctcgtctcccatgaaacaggtcataaaataactctctgaccttcctctaaagtagaaaataaaaccttcacttcagggctgccctccctatgtcctaggaaaggaacatctctatccttcaagacacagagctgtcaagtagaatctgaagaaacaggccttgctcaagttaccccaatttattactattatatcaaggcttttggcctccaatcatatttctctactatacacttcttcaccaaatttagcataaaaatacacaggttttgctgttttgttaggccttcacttgtgaagtcttcacgttatgtgtaacttgtgttaaataaatatgtatgcctttctcttgttaatcttgtgttttcgactctcagttatgaacctaacaatgaaagaggaaaacaaatccttatcgtacttcacgatcgccgcagtcatgatgcagaatgtgtccgtcatccccaattttccctgcctcatggcaggcggtcgtctttcctgagacccagccctgcagccactcgtctgctttctgttcctagtgttgccttctctagaatggcatctaaatggaaacacagtctgtgcctcgtttctttcatgtagactaatatttttgatattcattcgttcttgatcgtatcagtagttgtttccttttcattgcttcgtagagttcaggtgtataaatgtaccagaatttattcaccagttgatggaaattttgatttttttttcttttcctccagtttttggctagtgtgaataaacccactgtaatatttgcatgcaagtatttatgggtacatatgttttcatttctcttgggcaactatccaggagtgtgattgctaagtcttacaggaaatatacgttaaaccgtataagaaactgacaaactgtttccaaagtggttataccatcttgcattcctacaagcaatttatgagaattccagttactcctcatcctcatcagcatttggtattttccacgtattataaatttaattagtattctatgcattgtttcaaatattatatataaccttgtgggttctgtccagctgcagagaattattattatggccaatccaaatcctctagctcaattttcattatagtttggaggacaggttagtgttatggaaatcattatttgcttctgcttagagcaaaggaattaattacagctcctattagaaattttttcttccttttattaaaccaatattgattgattgcctatcatatgacaaatacaaataacatgtgattcctgccttctgggaattcatgttcctgtgagggaggtggaccaataaatacaattgcaatataatgtggttcatgctaaatctcagagggggaatggctactcagttcagcatgaggcctttaggtgttattagtatttctcatatctaaaagcagaactgactctggaatggcaggaaaattgttgaagttcatgtggctgagaggttttcattcccccctgacaccaaagatgtggtatctttttcagcatggattctccaattctccaacatcaactgagtgttcaacgattcgattccattctgacacttggttccacaagactgtctccatttcagatgccaggctacccacatttttgcctggctgactacaaatctggaggctcccttgacatctcctaaatctggaggttcccttgacatctccttgtgcaggtttcaaaactcactagaatgactcacataactcagagaaagcattacttactatgattggtttactatgatgaatgtagctcaggaatagccacatgcgacagatgcacagggtaagggatcaggggaatgtgtgtgcatggggctcccacatgctccctggatgtgccgcccttctagcatcctgatgggctcctcagcctggagcttctccaaaccccattgtttatgggttttaatggaggtttcattacatagcataattgatcaaattattaaccattggtgattgaactcaatctccagcccctcttcccttttcagaggtaggggaagtccagctgaaagttccaaccttctaaccgcttggttggttcctctggcaaccagcccctatcctgaatccatctaggggcccagcaagagtcacctccttaacatagactcagtattgttgaaaagggcttattatgagtaacaaaagatactcctatcactccagaaatgccaagggttttaggaactctatgccaggaaccagtgtcaatgatcaaatatattttctactataccataggaagtctagcttatcatcgaaaaaaatcattcatgacatttgttaaaacaataaggccgaattcattcagggggattatcttgataggtaaagagaccactgccatggggttttacagtagggtgagaaattggactcagctctaaatctatcagagacaagtgaggttttacagccaagggtgggagtcagtaggtgccaaattatgaagaaaaaacctcaggagtacaggggattctgtctgaacttattcagaatcctgcaggcactagagtgctgagatatcacctggggatggtgggggagtgaggacattgctcagaacacacgttgagtgcaggaggttctgtggggagtgaggaaattgatcagaacacttgttgagggcgggaagttctggctaaactgacttagcaggtttctggctcttggctcttgaggacaaggcccaaggatgagaccttgttgaaaaagtagctcagaggagcctgactagagtttggtcaagaagagaatctttgttgctatttgacccaaggtttatagtcatttgtcccgagctcatttcttcatggtagtctgtgtagctactgaaaatgagttggtttctagtttggccaccaattctcttaactcaagcacagcactggtaacatttagaaagggctggcacatatatcctttcatccgactgtggcaccgactggcatctccaggcttctgcgtgtacttaaatctttgttatacatttattataggacgttccatggtttatatgtttttatactaaaatctatatgcttatctgtgtgacttccttttgggcagagactgaatcacattaatctttatgtcttccacttttagtaaagggaccaccttaatatgtgttaaatgcaaaaatgaaatgcatcaatttcctgatctctaaagcagaactaataatttatatgaccaggaatcaaaataatgtaaatgatttgggaggctttagtgcacagagaacaagtctgcataaccacagcaaagcaaaatgtttaatagccttgttctgataatttaggtaagatatatgtgttttgattcagataatcacctgaattttccagtttgtttgaatgagaaacttattgaaaagagagacaatgatcacaggaataatattaaaaaatgtagggagagtcgcggggcatttttgttcactttacaaaacagtttgtaatttgagggcaaatctcttagatctgtggatggaaacattgtcttcaacataaacttttttttttttgagatggagtcttgctctgtcgcccaggctggagtgcagcggcacaattttggctcagtgcaacctccccctcctaggttcaagagattctgctgcctcagcctcctgagtagctgggattacaggcacacaccaccatgcccagctaatttttttatttttagtagagacagggtttcaccatgttgaccgggctggtctcgatctcttgaccttgtgatctgcccgcctgggcctccaaaagtgctaggattacaggcgtgagccaccacgcctggccaacataaacatttttaacatttatgtttgtgtttaatatccagaaaataatatttgtcagagttattggccaatgggttctactcggtgacaacggaaccattccgtttcatgtgattcattatagagttcctccaacatagcaggttctactcggtgacaacggaatcattctgtttcatgtgattcatttatagagtttctctaacatagcaggttctactcagtgacaacggaaccattctgtgtcatgtgattcacttatagagttcctgtaacatagcaggttctactcggtgacaacggaaccattctgtttcatgtgattcattatagagttcctctaacatagcaggttctactcggtgacaagggaactattctgtttcatgtgattcattatagagttcctccaacatagcaggttctactctgtgacaatagaatcattctgtttcctgtgattcattatagagttcctccaacatagcaggttctactctgtgacaatagaatcattctgtttcctgtgattcatttgtagagttcctccaacatagcaggtgtgcttaccacaacactctctcttccctgcatctgtgcacctgcaggagttttgagtacaatagagcaggggcagttaacgtggcatttcttcctcccatttttcatgagggttttgaattttattagaagttcgtcaggcactattttctgatttttttaatgtaaaagccttcttttagatgttttgtttgcttacctgtgcttccttgcttgattgccgttcttacacatcaggatcttgaatgggttttcagagatttactttgagatctgtttctcaagctcattgacagttagttactcttgatgtctcccactttgttaaatttagatgaaaattctccttgatttgttttattttgtattcagtcaccctttgactgaatacaaaacattttgaaacaaacatttattgttttctaggttaaatgttttctttattatttttcctcatggacagggtgctttgtttcccactgcttacattgagggttgaaattcagaacagaaacagtaaatctttccagttccacaggaacgagaatggcaacgacatatatgaggccacggtggagaaataatgggaaacatttgaaactttaagaataagacaactgtaagggtttatcacttgtcatattctgtttggtattgacaagatacaaccaaagggatcctcatctgctatggtatatgggaagtttatacacattagaggaatgagcaggagcagaatggagtaaagaaagaatttagggcgtttaggtgttcggagaaagcagcagttttttttgggggggggtgggaggagaaatggctgttgctttagggaagaaaagcatgggttactgccctccttgctcctgtggggtctggaaaaatatcagagaataaacaccttcccatctattttttttctgtcattttctaaaggtgactttattccatggtaaagagtaaacttatagaataaatcatgtctaagtgtttaagtgaaacatctttgtttacttctcagttaaaatacaaaaagaagaaacccggtgttcaaaaacaatttcagaactcaaatttacatttcccctggaacaatgaagctgccatcatcctgaaaagtattttcctggaacaatgaagctgccatcatcctgaaaagtattttcacaggaaaaaaaggaaggtgggactaaatttctggaacacaaatcaagagtttatgtaacaactaagaaaactggaatatccactataaacccatccaaaaaggaccaacataccaggctaaatataggaaaaaatttcatttaaaatttagaggtgttaggatcaggccaataaataagaacactaatatgtccttcataaaaaggaaagatgtccatacatgacgtaatgtcttccacaggaaaacagttgcctttattaagagaagtgacttttcaaggcttctggcgatctttctttttttttctttttctttctttctttcttttctttcttctttctttctcgctctctctttgtctttctttctctctctttctttctctttcttccttccttcctttctttctttctttctttctttctttctttctttctttctttctttctttctttctttctttctttctcttttctttttttttcagatggagtcttactcagtcaccaggctggagtgcagtggtgcgatctcagctcactgcaacctctgcctcccacgttcaagtgattctcctgcctcagcctcccaactagttgggattacaggtgcccaccaccatacctggctaatttttgtatttttagtagagatggggtttcaccatgtttgtcaggctggtctcaaactcttgacctcaggtgatccactgccttggcctcccatcattctgggattacaggctgacgtcagccactgcacccagccctagtgatttttttttatgtgactcgtagttttgaaaagtgctgaaataaagtaaaatttttacttagcacagagaggggttgattttctttttctctcaatggtgagtcgagtttctttgaatagttttgcctttacctgattccactggtttccatgtatttataattttttttggagtctggccttgagaaaattttcaaggtaactaatattcacgaagcacatattgatcacactgccaagcattgtgtttgggatggagagtcacagatgagaagaaatggcctttggggaacatggagtctcatgggagcaggagaggtgaaagcagttgcagccgatgaaattcggggcttgacaccacaaagtacgacaccttggcatttgagaaaaccacagacgcaggaaggaccctctgaccttctcccatccctctcccctgaagcaggtgataaaaactagaaaagaggcagggcacagtggctcatgcctgtaatctcagcactttgggaggctgaggcagacggatcacctgacgacaggagttcgagaccagcctgtccaacgtggtgaaaccccatctctactaaaaatacaaaaattagcgggacgtggtggtgggtgcctgtaatcccaggcatgggaggctgaggcaggagaatcccttgaactcaggagacagaggttgtagtgagccgagatcatgccactgcactccaacctgggcgatggagtgagactccttctcaaaaacaacaacaacaacaacaacaaaactagaaaataattttctgaccttccccagaattaggtcataagatcctcatgtgagaggtgcccacctcatatctggaagtaatgaatgtccttgttctgaggacatgaggacagagaagaatctgagaaaacaggcctcattcaaaaagtgttgccttggtttgttaccattaggcccttcctcctttttccgatgatacttctctacagctatccacgaagtcacacccagcatcaagatgcacagatcactctgtttctttgggtcttcattttccaaggctctcatgtcacatgagacttactttagtaaatctgtacgctttccacttgttaatctgtcttttgttacttgggcttcagccgtgaacccagtaatggctgagaaaggaaatatttcctccagtgtccaggccactgtgatatgcgcaatgagggggtctgagtagagacccaactgaatcccatctcttcatagagacacaaaacctttatttagagcaaataaaatatccctaaatctccactgtaacctgaaaagacaaaagctattatgatatggacaaaactaagctcagcaagaaaatgctgttggtgtgtctactttttctttggtttactttctcattggaaaatgcaatatggttaaacacttttccccacataatctttttctgatgtaatattttgtcttcagccccatgagacttcaagatcttaacataaagttgaaaaccttgagagagttacttgtattcctgtggggtcaatagaaagcctttcctatgggcctttctgagggcaaacatctaacatctgtgggtttccaggacctcatgatgtagtctaaagtcttcccttttttctttttttctttgagacagagtctcgctctgtcaccaggctggcatgcagtgatgcaatctcggctcactgcaagctctgccacccgagttcaagcgattctcctgtgtcagcctcccaagtagctgggactacaggcatgcgccaaacacgccaggctaatttttgtatttttagtagagacggggtttcatcatgttggccagggtggtctcaatctttgggcctcatgatccacccgcctcggcctcccaaagtgctgggatgacagtgtgagccactgcgcccagcctaaagtcttttctaccttcataaaggttgacgaaaagctcagatttttccacaaatgagctatttgaaagccacaaacacagactaacacctattacagttgtttggtcagtaaataaaaattactaataatgtgggaattattatctttttgactgtgggagtaagtgcttctctggtacaggtttcctgttatctttatgtgggcaaaagaaagacatagacacacacacacacacacacacacacacacacacacaccccagttgactgggattctgaaaaccaaattctcattgttattctgacagcctcttttcactttcagtgtttttgttgagatgaggcttgaatgtagtgtagggaggatttcaattgtgcaactgtctttggctttatacaaatttttaaccaataggaaacttctcaaggacaaataaaaaagcaaagagaaaaaggtgctgttagaccttcaacagtaagtcagtttcacaatactatttttaaatttcctattaaaatatcactctatttcttagtatatcactttggcatatctgcttctttctctgtattaataaatagcgcatacagtttgcctttggtactttgtacaatgttgtttatctcagtgtaaattggtagcgtgtccacaaaggcgattggagtgtgaggcgtgagtccttaggagcctgtctgccatctaagccctgttagcattttcctttactaatgttggggtggggggacctcagaaggggcacagcaagcatatgaaagttttgttacagagatgccagtatttgtccttagaacaggtccagttgacaaaggcactgcaggatatgaaagattctcattacaatgtcacggcaacatgactgaaattattaactctccacgtgggatgatggatggtatagggtggagatgtccttggcagaacatgttgcttaattatcttcttttagtaccagcttactgtcacgttcctatgatcgagtactattccaaatgaattcataaagagagaatatttaaagatcttatccaataaaagagcagattaaatgtcagatcttcattagtggttctttaatcaagttctttttgtggttttatgacaaatgctttcatttttggcacttgaacctaagacccccaggtctaaaaggaacttttctcatttgaaataaagggggatttaatgattttcaaaagtagaatttatggtctggtggataagacttataagtagaatctggagagcctttaattttagtgttggaatgaatgacacctcggatcttttacagggctgtaaagccctgtgacttagtttccctataggttagaaacagaatgccataaaatatacgaatacttgtaatgctgtagattggtaacatttatcaggcgacatcaggattcttaatagtctgcagtgggctcatgtcattcttaaaaaaatatagtcgctacctttaagcaagttacccatgtaattgatttaattagttaatatttgagaaatattttagagatggaatggataatgggatatcattatatccaggcctgcaccaaaacagactttagtagcattctggttttccagattagaagaacattttatgaacaggaaaaaccgaccacaaggagcttcaagaatgcccatcccaggcggtttccagggaatcctgaagtaaagtatcagatccagaaacagcatagctctgctgtgaaggagttgattcagcagagcaacgaaactagcctgtttctgataatacggaacttagaaataacttttattttatttattccaaataatttataatttattatttccaagtgtatttatggtcctggttatcagatgcaaaaataaaaatggataaacaaaatttagctacctgaaaccaagtctatgtgttcatatattagaaaatcgtatgcatccaaagccaaagtcaggtgtttgtctcatctgaagagtttttgtgtgagagattatagcctttagacccttacgccgggttcagatatgaaggaaatggtctcatagatgacttctttttggtctattaatttgtagaccaattggaactctttgtaagcaggatacttatggtacagtaatcagtgctgctattgaggatgacttgagacgaaacaatattgtggtggaactctggatcatgaagtccaatgatttacactcaactgagtatattaattaaattgtaactaatgattcttgttacacaggtgtgggtgctttcaaagatcaaataaaataaaataagtgttaatactcaaaaagataataaaatataaaatattaaaacaaatatcatataagaccctaaaatagaaaacagtaatcaattggggcctgtttatatttgcattaagtcattaaactaaatctatttcctttttagataggatacggttctcacagatcagatatagcaaatatggtccctgtgaaagcctcatagtctttctttatgaactagctgtagaaatatgggctggcatataacacatttacagaggttttagttcactggaacagctgtatgcgggatgtgttgatgaattaatattagctttggggagaatctagtagtataacaaagggctatgtgattgttcatgttccatttaatgtatatatttttatcaatgccttcactatagaacacttgaacacaggaaggggaacatcacacactggggcctgtcatggggtggggggaggggggagggatagcattaggagatatacctaatgtaaatgatgagttaatgggtgcagcacaccaatatggcacatgtatacatatgtaataaacctgcacgttgtacacatgtgccctagaacttaaagtataataaaaaaagagaaactactcaatacatattgaaaaagaaaatgaacaatttatataaaatatgagcagtatgcttattggataatgacagctgaagaggtagatattcagaatgagatttttaggttagaatagagggggagatcaaccaggtacaactttacagggatagaagcaaagtcatgtctacagtggaaagaaatattgatgtaaatatcaggcagtagcttgacagcagtacctgtaaggaaggctaggggatggaggtagtatgtgactcagcttctacaactattaacttgcagggactacagattacttacattctaatctttgggaattagcctggtatctgggcatgaagagcactcatcaaaggtttgttgaatgtgggagattgtattttccaaccaagtgtgatcacaacgtcttccacaagctcttctatcacgtgaccctatcaagcaatggagtctacctctcatcctcctttaacaggggcaagcataatgactgctttgagcaatgaaatacagccaaaataatactgtggcccttaaatgctctcaaagcttctgtttcctcctctttagaagtcagctgccatgttagaagtgtgactactttgggattctcaagctattaaaagtccaagccactgatcatgaggtcaggggttcgagaccagcctggccaacatggtgaaaccccgtctctacaaaaatacaaacataagccaggcatgatggcagctggctgtaatcccagctacttgcgaggctgaagcaggagaatcactggaacacgggaggcagaggttgcagcgagccgagatcacgtcattgcactccagcctgggcgacagagcaagactctgtcaaaaaaaaaaaaaaagtccaagccaagtggcaatttcctaggagactgagagcacatgtggaggcagtggggggaagaatggctgaggtgagtgaagaggccaccccacgtgagctttcagatggttctagtcccactgctgtctaacttgcaaccacttgggagattccaatcaacaactgtgataaggctagtcaaaccacaaaacgatgaaatacactaataagctgctggcttaagtcattcattttgggagtatatttcaatgtagaaatagataaacgaaacactgaatggctgagagattctagatgtaattagattctagatgagtattgatgtagatggcatccatttgcaatctctatttctaggaaacagaagaaaaatgggaaagaaaatatgctcatttcattaaaccgtagagtgctttttagtccatttttcctgctatatataatggaataccacagactgggtaatttataatgaacagaaatttattgactcacatttctggaggctggaaaatccacaattgaggggccggcatctgacaaaggccttcttgctgtgctatgacatgaagacaccacatggagaaagagcaaagagagggaagagggggggaatggagggggaaggggagtgtgagggggagaggaagacggagagggagagggagacctgcttctgcataacagcactagctcattcacgaaggcagagccctcatgatctaagcacctcttaaaggtcccacctcccaatatcatcacaatgacagtgaaatttcaacatgagttttggagggacaaacattggaagggtagcagcttttacacagaagactgagtaaaattagttcgctttaccccacaggcagaactgagagcatgaatgaaattttctgggaagcccctgccctttagaagagatattgtaaccttgtagtgactggtgttatcactcctgaaaccagctgctttgccagtctgtgaattacacagtcaagatacttgcacctagtgaaagcttaaagggccatccacctggaatgaagcaggaaggagtcatgtttaggggagggttgttggcgggtggaggtatggaaaggttgatgcaaggtataaaaataacactggttaactctagaaagagtgtgtttacattctagtttcaaagggcattgatcttacctcacaatgttagcatattaactatagagagattataatgacatctcgtggaaactacatttctgttgattaacttatgtgaagcctaaaacttactttgtgcattaaataattaagccaattacctaacaaatttagacttttctgtactttcatttattttttaacagaaaatgtagtgtagactaattgtttacaaatgtcacacatggaatcacccaggaagcttctttaaaaaatcctaatgtccaggctattctgtgtaataataaagtcaaaaactttaaaaatttatagtaaaaataaaaatccagaaagggtgttgttaaaaataatccacaagcctgtagagaaggtcttgaaggcaacaattatgaccacattagagaaatgcattcatgaaaacaagacccacagccattttaactctggtagtttctctgttctaaagactgtgtgatttagagggactagagtttgtttgtaacaagaaacaagtggaggccacagctacaggcaaatgcattggactaaatggccaggtgtttattcattttacctctatgtggtattttctatatctgctagtgaagattattggcgttaccacttgagagactctgagggtcaatgttttagtgtttttgatttctttgcagcactgaatgtaggcattgttatattcatggaacatgtagaaacacgtgcttcattaactaagtggagactcagtctactgaatattttttagttgttgttcatgatagtttaaaatataatggcttctaatgacttttagcgttagctatactattcaatcctttgttccccacactaaagcactttcaaagattgctttatattgcatttaaaagcttggttacctaagttgttaacaaaatatttctgtaagttaacatttttgttgttgatgctgagataataatgcccatgcatgcctaaaccgtggtttctttagctgagagcaagtccaatagcttttataatacttcaagacctatacacactttcgtagttataaatgaacatgatagaaaagttatttatttgagacaagtctaatagttgaagatttttaaaaaatagtagtgttttaagggtaatattgccttggcattgattctctgttcaatattttgaacagtaaaatatgataattcatgttacaaattaagagaagctaaacccactataaatgacaaggtaatttaaaaatgacttatttcagtaataaaacaggtttcgtctatctcttctatagtttagtcttatctgagaactcatctattttcctttactgcactgactggatgagctattgatgaagaaattgggaaacttttttgaaatcaccaacttttatatgtcttatgtcaagagtcggcttccattgtcttccaagaattatggtacacttcaaaagtcagagctagatagattcttttgtgaatggaggaactatcccaagattagcttgtgactgtgatgtttacatgcttcttgattccattgaatgccatcattagcttaaatactgtttgttggagccaatgaataaacttaaatgactctagtattagtagaatatagaaaggaataatagatattggcctaaatagcttcagaagaatgaatcctttgcccggagacaacagataagtagtctgcactgcttcctgagtgggcgccgtgtgttcatcaatgctttcctgaagtttatttgaaaactctacatctttaattggttgctttgttaatacactaataatacccattgtattagcacccatacatgtcattagtttattaaagtaacatcattaccatgaaataacctgatttatattttttcaaaacagtctttttaaagacatggaactaatattgaatgcatttcctgaaagcactatgaagacactaacgggtagcactttataagttttaacatttctggaacagggtagaattcgctgatatttactctgtgcttcccattcagtgttcctgttatacatttctatcatttgattcttttaacattttattgcacttaactgataacatgccctgccccagtgccgaaagtccagcctgcctgtctacatgtaaatggataacatttgtgtttgttggaatgaataaaaaaagattaattggttatgcaatcacattaaagtatctatggtaagtttgaacttaaccaagaggctggacagaaactatagggccaaaatttggtatgacatatagaaaacttgtgaatttttgtttgtaataagaccctaggcatcaacaacactatgaatctgttgaatcaagtttagcctaactgcctccttacatattttctgttcagcctaaaggtttctctgtacatagtgaactataatctaaagggaggtgtaaacagattgtaacctacttttgtgccaattgctgagttttggtcaatcaaagggggccagctgttcaaaccacattcaaataaggcaaacactgagctgtaaccaatccagctgtttctgtagctggtttccattttcggtatatcactttcctttctctgtccataaatctgctacgacgtggctgtgctggagtctctctcagccttctctgatttgggaggctgcccgattggcgaattgctctttgctcagttaaattctgttgaatttaatttggctaaggtttttattttaacacattatagaggtgcagataaacaatgataagatgtcaaaacccttctggggagcactggaagcctcttgctatgattctatgatataattcaaacaccatattttgctgacaacttcctgagtgatattggaaatacagacatactgcatttctggccaaacaaccatgacatacactgtagatttggaatgaacgctattaagataacccatccctctctctagacaggcaggcagccagccatgtgtgtcctctcttcttctttatcaccaagaatgactgggagctagagcagcaatgttgatgggcattgatctgtttcagaaacatctcaaggactgagaaatgacttcgggtgttcccttttcaaaagatgctatctcatttccttactaaagagatgagaaaaagggtggaaatttagagatgcaaggtaagaactcaaataatgtgaattaagtctgaaggagatttttttcccctcctatgaggtatttactagctgataatcctgcagtgaaagaatatccaaccagtgagagttaggaaaaaatatggattgttgatttggaaggagactaaaaaactatccctgccataattttttttcattttacacccccttaaaataactaagaaaaatattgcttttataaaacactgcagtgaacacagccctggaattctggtattataacaactttcaggtggaggcataaagtgatattccaaaatgttaaaaatcatcaatacgagtaaaaatctgactttgaatattgaactgcagtgttattacttcctcttggtggtgtgtttccaattttagggactgtgggggaaagacaagctgcgcacatacatgcattctcccaatatcagccccattcatttggatggatctaatgattttactttcaaacttaatgcccctgagattccctaataatctcacattctatcagaaatgcccccaccatcaaaacgatgtcttatgaattcatttctttgatttgtagagtggcagggtacctaaagttaacatttgtcacagtgttgcataacaccttcattaggccaattacagagagtggcttgagtgggcaacctgtgggcagtcatggtcccgtgtatcttcccaccggcactgctgggaccagagtgtgggtgacagaacaaaaggattccatccaaatgtgttagcaggccccttcaggtaggctgtggcaggagagaagaggaaggatggttcaacagattattaagagaatgtttcaacattaaaaatatggggcaattatatgaacactacatgctactaaaagtaaaatataaaatagaaatgttctgaggaagaaaaacacattcaaatgcaaatgaagagaaccaaaatgagaaaataatgagccaaatagcaaaagttaaaacttgggtatgtttgtctttcaataaatctcttctccatttgaaaaacaactaaatgtctctattccattatattagatttaaaaattcttagagtttaaggagtagtttttttaataaagtcatatacacatccaagcataataatttactattcactacagtgatttcagcatagtgtgttatattcagtatatatgtaaatgcctcaagaacatgatcgtaatgctgattaaactcctcagtaaaatattctctcaatacaaactttgcttttctatcgttcggattttgtttaggaagaaaatttcaacaagcctgccacatagacagacttcgaagacaaagacttttttgaaatagaaagttacagagtttctcttttaaaagttccttgtgtttatacatctttgggtgttgctcttccttcattatcagagagagcagtgcctcaagtctagtgtcagaggcatctgtctgcagccgaagcactttgtcaaagtcaggagggcttaataaggctcgattttcactgaatgcatttgttaggctgttgaatgttaaatcgcaagctgaatcattgtgcaattgctttcttttctgtcttttttttctttttctggccaagtcagaaatggctctgcagagacaagctctgagttatccattagtggattaatgaatgacaatttgtactaaaactaatctcttttttcctttcaaatgaagctcatcttcctcaatgtgttttttccacgaggtgcatgaaattatcaacatgttaccaagaagatgaattctgtgtgtgacccatcagcatcgtcgatacgtagcagtgttatggcagagctccagcataaagccacagcatgacaccagggttggagaggacctaatacctgcagtcttgggcagccaggggatttgttgctctacaccaatttgctcaaatatagaacacatacatttaccgtttcccatagatatatcagcagctcctttcccagggatggttgaaaacctttggctctgttttgctgtgtctgctttctaaaccttctacccttctttaacttgctgactatccatttggatgctggctgactgatttctcgatgaacctcctcttcaaattgggctttcagaaattgaatatactctctgtggtgggtagtatattgtccacaggcatctgcaagtgaggtagaaggcagcatattgaatatactctctgtgatgggtagtatattgtccacaggcatctgcaagggagggagaaggtagcatattagatatactctctgtggtgggtagtattgtccacaggtatccacaagtgtgggagaaagcagcatgctgaatatactctctgtggtgggtagtatattgtccacaggcatccacaagtgagggagaaggtagcatattgaatatactctctgtggttggtagtattgtccatgggcatccacaagtgagagagaaagcagcatattgaatatactctctgtggtgggtagtattgtccacgggcatccacaagtgagggagaaggtagcacattgaatatgttccctgtggtgggtagtatattgtccatgggcatccacaagtgagggagaaggcagcatattgaatatactctctgtggtgggtagtattgtccacaggcatcctcaagtgagggagaaggtagcatattgaatatactctctgtggtgggtagtattgtccacgggcatccacaagtgagggagaaggtagcacattgaatatgttccctgtggtgggtagtatattgtccatgggcatccacaagtgagggagaaggcagcatattgaatatactctctgtggtgggtagtattgtccacaggcatcctcaagtgagggagaaggtagcatattgaatatactctctgtggtgggtagtattgtccacgggcatccacaagtgagggagaaggtagcacattgaatatgttccctgtggtgggtagtatattgtccatgggcatccacaagtgagggagaaggcagcatattgaatatactctctgtggtgggtagtattgtccacaggcatcctcaagtgagggagaaggtagcatattgaatatactctctgtggtgggtagtattgtccatgggcatccacaagtgagggagaaggtagcatattgaatatactctctgtggtgggtagcattgtccatggacatccacaagtgagggagaaggtagtgagaggtgacagcgtgctggcagccctcactcgctcttggtgcctcctcagccttggcgcccactctagccacacttgaggagcccttcagcccgctgctgcattatgggagcccctttctgggctggccgaggccagagccagagccggctccctcagcttgcaggaagtgtggagggagaggcacgggagggaactggggctgcacactgtgcttgtgggccagcgcgaattctgggttggcatgggctaggcaggccccacactcggagtggccagctggcaccaccagccccaggcagtgaggggcttagcacccaggccagcagctgtggagggtgcgtccagtcccccagcagtgctggcccaccagcattgcactcgaattctcgttgggcctcagctgcctccccatggggcaaggctcgggaccagcagcccgccatgcctgagcctcccccctgccgtgcgctcctgtgcagcccgagcctccctgacaagcgctgccccctgctccacagcgcccagtctcatcaaccacccaagggctgaggaatgcgggggcatggtgcgggactggcgggcagctccacctgcggccccagtgcgggatccactgggtgaaaccagctgggctcctgagtgtagtggggacttggaaaacttttatgtctagctgagggattgtaaatgcaccaatcagcactctgtatctagctcaaggtttgtaaacacaccaatcagcgctctgtgtctagctcaaggtttgtaaatgcaccaatcagcactctatatctagctaatctggtggggatttggagaacctttatgtctagctaagggattgtaaatgcaccaatcagcactctgtgtctagctcaaggtttgtgaacacaccaatcaacgccctgtgtctagctcaaggtttgtgaatgcaccaatcagtgctctgtgtctagctaatctagtggggactcggagaacttttgtgtctagctcagggattgcaaatgcaccaatcagcaccctgtcaaaatgggccaatcagctctctgtaaaacagatcaatcagctgtctgtaaaatggaccaatcagcaagatgtgggtggggccagataaaggaataaaagcaggctgcccaagccagcagtggcaacctgctggggtctgcttccacactgtggaagctttgttctttcgctctttgcaataactcttgctgctgctcactgtttgggggcacactgcctttatgagctgtaacactcactgcgaaggtctccagcttctctcctgaggccagtgagatcaagaacccaccaggaggaatgagcaactgcagacgcaccaccttaagagctgtaacactcaccgtgaaggtctgcagcttcactcctgaagccagtgagaccatgaacccaccagaaggaagaaactcagaacacatccgagcatcagaaggaacaaactctggacacgccgcctttaagaactgtaactctcaccgcaggggtccacggcttcattcttgaagtcagtgagaccaagaacccaccaattctggacacagtagcatattgaatatactctctgtggtgggtagtattgtccatgggcatccatatgagggagaaggtagcatattgaatatactctctgtggtgggtagtatattctccacaggcatccgcaagtgagggagaaggtagcatattgaatatactttctgtggttggtagtgttgtccataggcatccacaagtgagggagaaggcagcatattgaatatactctctgatgggtaatattgtccatgggcatccaaaagtgagggagaaagcagcatattgaatatcctctctgtggtgggtagtattgtccatgggcatccacaagtaagggagcagatagcatattaaatatcctctctgtggtgggtagtattgtccatgggcatccacaagtgagggagaaggtagcatattgaatatactctctgtggtgggtagtatattgtccacaggcatccacaagtgagggagaaggcagcatattgaatatactctctgtggtggatagtattgtccacgggcatccgcaagtgagggagaaggtagcatattgaatatactttctgatgggtagtattgtccatgggcatccacaagtgagggagaaggtagcatactgaatatactgtttgtggtgggtagtgttgcttacaagcatccacatgagggatttacttcccatagaaatattttaggagggaagttgttggggtttttgaaatagtgtttatgttttagtgcatgccctttaaaatatccctcctagcaaaaataaaatataaaataaagtaaaataaaatgtatagagatatatagtctccatcaatgaacatgtaatttgtgattaataagttgttactacaaataagaaaaagttgagtagttttaatggtcctagttcatatactgtggtgagcaagggttagaagttgaagatcctttgaacaaagcagtgttcttcttgtgtagcctcatcctggcgcttacagaaaccaagctttcttgatgaagcttccttctaagtgggcatgggagaagcagggcagcttacagctcttcctgagctgcagcatctggttggggacagattctcagccttctggagtccctgttggatgctggctctttgttctcaacccagtccctggtcaccccacctgtgttccccagaatccagcttttagtcttggtaacttcacacttcccaaagacagaatcagctgtggctccccagagcaagctgacttgcttcttagaaaccccagaaataaacagtctttgaatcccaaaatggtgtacttggaggggcctatagcattcaaatttcattcaaatccagagcttaaaggagtctaggttacccagaagcagatgacaaacaggaaaaactgctctgtgagctggttatgcaaatattctttcagaaatatggagtttctggaatgaaggaagaggataacggaattaagtcacgcgtgtggttagccctgattgctaaggggagccattctctgatatataaatgacttcctgtcaagggaaaaatcaatgtcttccagggagggaggaggcgggaagtctcagtctagcaaagaccacagcttgtgcctgtagctgtttttagttctctgagcctttattttgctcaactctaacaccagtgttagccacccgctaaccccactcttagccacccactaaccccactcttagccaccagctgcagtcttcctaggggaaggctcctcttcctatgggttgggtgagtaaccacagtgggctcctgattctaagctgcccctcattcctgtgttgtctccaccattttcttcctcagcctggaagttgacacttgtaatttgcccttaggccctcgttaggagtagctcacctggggccatggaccacagctaagcccagggatagaactgtactttcaggtaataggttttaattgtaatcctatgtattttattttatttattttacacactgataaaaattgctctaagaaagattctattgacttcctcagactaacaaaagtgctcacggcccagaaaaggttgcttcttcctggcagtggacctgctgccaccgcttcagtgactctggtgtccttccaccctgggaccaggtttcattcataacaaacctgtgtctttgtcagcacaggtttgtagcccggatgacatctgccatcctccacaatggagctcaaatgccactaaaacgcttatttccagactttgtccgtatttcatttttacccgtttttgtcatgttccttttttcatcaataatgaaaagtcctgggcccttgtgtcctgggtcctatctaattcatctttgcatcccagccgttgtctgacagaaatgaaattttcaatcaaagtttgacgaatgtttgaatgatgatgaatcttgtggcacaagagcctgctttcctttcttcctatcagggcaccagcggccctgcagctgcaagtgccacctccagccaagctgtgtttctgggtacccctgggagttcctggtgggcccaagtaaggtaagacagagaagaaaaaaatggcatgggagaagaagaagaaagaaggagatagagaaacaggaaagagagaagaaaagggagagaggaagaaattgtggagtggagggctgccctgttctccacctcagggacataagtaagctgcctgtacaggttcacagaaaaatggatttgattccagagcccttcctcattgtgtatatttgcactatcatgttgtgtagtttttaagaacccataaagaaaagcaaaaccttgtgggcctgtaatgatctctacagaatgtcagataaaaagatgagttcaattctactatatttaaaaagccagcaggatgcagtggctcacacctgtattcccaacactttgggagttctcttgagcccaggagttcaaggctgctgtgagccatgatttcaccactgcactccagtgcagatgacagagagagaccttcttatctcttaaacaaccaaaaagccatcaacataaatgttgttaacagtgtgctgtggtccataccatcctctctctctctctgagatgtctctacattccagtggagagggaaaatgaaatctattgtcagctaggtctgggactggtcttccccagaggcaggatggctattttggcataatttagacattgacagaaagctgatttggccccctgaatatctagagttttctctctagtctgatattatgccaattatggtatactatgacaagttcttttgggtctcagagtcacctgctagtacatggaggaacatattaagcctctatcagcccatctcatcacacctagtgcctgggtgtatgccagcgggtcctgtagaataggtatcagcccatctcatcacacctagtgcctgggtgtatgccggtgggtcctatagaataggtatagaacagggttttggtttttgtttattttatgaggggctctggagtaggagagccagagcatggggggatgctatcaaggacagctcagtgccatagggtgagaaagcctacgccaccaagtgatgctgtgtgtctcctgaagtcataagcgacaaggtttatggggaaacagaggaaatcactcaactaaatatcatcttcaatttcccctaatttctgaagtttgggaaatgctgagacccatgacttttcaaattacgcatggtctttttaagttaaaaaagggaagtgggtcaatgaattagaagggaaaaataagacagtcttctcccttcttctatgtggcaggcaggggtggcagggagttacttctgtaactcgaaaggcttctgactttttaaaaggaaattgttgtcattgttaatcagggcagggtcttcttgccctttcttgtagaatagcttgggtttgaattttggctttagcccaaagtttctgggttacgattgcacacagcaggcttgtgagtgcgggtgtcaagaaggaggtgggattttcataattccactctctcagctctcaactttgtgaaagtgccattactaccagaagtacttctctatctgctcatgtcttcctgctctacaaatctcaacagacaatgatgaatcatccctgaagactgctccgcatcatacatttatctgtgtttctcagtcctgggttgacattttccttctctctctccatcccaggatgtctcaagctcagcactattgacatttttggttgcataattcctggtcacagggggctttcctgtgtcttgtaggatattttaacaacatctgggcttacataaagcacaaaaagggcctgaagctctgaaggttggggaaagcacactcaaaatccagagcctggtcagtgaggctcaggccttccctgagtctttgtccacaatatcaagaaaccgcaatgaagactcaaaaactatggactatctgctgtgacatctgcctctgaattgttagatattagcaaaataatatggcttttgctggcacttcagatgctggtgggctatcacgtggaatgattatgaatttctgtaaagagccaagccagctgaggcttggtgggtggactgttaggaagcgtggctgggtccattagccgggtgtttcagtagacgaagctctgggacgtgacactgaagtcagcaggcccaggaagctaaccacacgtcttgaaactgcagcctgtggcacaaaagtaaaatgggaatagattagtcttttgggagctaatctcccagttgagatgcaatagaacttacagcaagtgacaactttctaaattattttcttatgcctcatgccgttcttttgtctctatttttagtgtttccacctactaacttcattctttctcccgctatttctaatacatcgccaatgatgtattttcaataagaattcaattacctggagaggcagatgtgctaactggcaatctgagggtttttctgcaagttgattgcaaagctgacttaagtttctagccctgctgctgtcaggagagactcactgtcaacaagctgttaaaaatgaaacttcataatgagggagaatgtatggaacatcaagtaatctccttgttcttaccaattgcctcatttaattggcactgttttattgaatttttaataagtgaagtgagattttaatgtaatcccatctactttagacctaattcaacatattaatttattacgaatctttgttttttatgaagttatgcattgaaaagtttcccaaattgccagttatttgtaaactttaaaaaacttctccaaagtagttttgtcatttgtaatagtgcaaaaagcaacgcaaaaccacacaagagcattttgttgactgtcgccgcagttaaggtactgagtgttgttaagggaatgtatgtttatatttgctaaattttcatgaacttggtaattgagccatgattatattaaccctttagattgatagaactatggcaataactatgtagtcctgtgataggcctggacgttgaaaaggtaagtggctgatttcatttaattgtgtgatctgaagtgggtctcattataaaccatacacctgatttgagtcatacaatgtaacttttagtgaaagttgtaaaggttttcctgaaaaaatgctgaaggtgcttttgcctagtaactgtattctgattattgtatttcagggcactcagggaattagcagcttctcagatagagcacgtaacgagctaccagtgtgtaaagtccccactattttaacaaggagacactaaaaccagaaagacatttccagtcacccagatcccgaaaagtacataaaaatcacctcaggacatttagtggaacccatgaatagctttcagtaaaatgcacaattcatgtgtctataattttctaaaaatttggttctaaatacctcttaaatttcataaataatatacgttaattttttaaaatattagacaataagcatagagaaataaaaagttaacttgtaactttatacccagaggaaattactgttgatattttgttgcataatcagagacatttctattttgtacaatattgtgaaaaaaaaactgttcataatattttaaaataaattttctagtgaataatgtaactaacaagcacattattagcagcagcattgattaatggctgcagagcatcttttggtatgggtctactgaaatgtatttaaccaatcctcaaagttggttatttaatttatttttaatatttctgctaccataaataacgttgtgctgagcacttgcacttcaggttttctgtgcttcttcactgcggtcttacgataaatatctagagcgaaagggaatttacacggctaaaaaatgactcctagagaacttcagaatctcccagacagcctattcaattctttctatggttcaacaaatggaataatatttcaacaggcacttcacagaagagatgaacaaaatggaaaaaagaaagagaatgaagtatgcgcttactcccgaatccagagcagcagtctcactggtgcagacacgtccctgagggtagatgttacttatgggggatctggcgtcagcggctgtcctggaccctggccacattatgccgtcctcatcgttcctgctccaggaagagaaacaacactgctgagttgctgctgggcgcatggccctggcatcgtggcctccatatgtcggttatttacagggttttccctgctgcactggtttcccgtggtggcacaacaaatactacaaatttaacatcttaaaaaaaacagcagtttcccctctccaggtgccgggggctggaagtgtggagtcaggcccagcagggccgtgctcgctctcgaggctccagaggagagcccttccttgcctcttccagattctggtggctcagagctctgtttggttattttttacagtttctatttctctgatgatatagtcaatctttccactcatgtgaagggcacttaccttcatctcactgagcacaattatgcgagcgttgcttcagagtcttttggggataactttgacattgggtcttctcaggcttgggatcttctctcttgagaactggtcacattttcctggtgatttatatgtcaattaattttgaattgcatcatggtcattttcgacatgattttgtgtaagctctgggtcttcattttaaagtataagttttattattatccaggtatggtgaggccaccaaaggaagtcacaattgccatccaaaatataatttgctgttcacagctctcaagaggtggggtgtgcctcgacatgcagggacaccatgaaagcacaagggttggtcatggacagaaggaaggggaggagaaggtggcaggcaccttcatcatgggatctgcaggaaggaatgggcgaggcagcgtatgctggcttaggactggccagtttgaatgctttcagcaggctctgggttgggggccacctgagttgttgggcacctggtcctgagacgatcagggaaggggcatatgtgtttggtgctcaagggccagacaggggaggtgggggtgggctgactccagcttggttggtttcccctgaaggctgggctgacaggtgagttgtttgctatctctaggaatcagttaaccctgggaggggtagtctgtcccaggtcagcaaggccccagatgccaaggcatcaagaacacagaatataagaaactagaaggaatgcagccttgttaaaaacccctcggggaatgttgtttattttttccccgcaggcaaatccatgtggcttggctcagagggcaagttctgtctccctgtgcgtgggcggatcccaaggcctttgctaagctgccctggtggctctgattttgtcctgtgcacaaacagctgggggggggaggtggggaccaggactgtgggggtgctacacacagagccagacaagcccattctgcagctctctcctctaagggctccccccacctccctagcttacaggggctccttctcctgatcctttggccagaaggaaggggtttcttttaaagtccttgccctgaggcaccacacagatgtggctctataactggtgccacctaaagggaaacatgacaagaagagagagagaaggagggagagggagaaggaggaagatagagggaaaggaagttggagagggagagtagggagagaaaggggagagaagagaaagggaggagggaaaagaagtggggagggaaaaagagagggacagaagaggtggggaaagaggggcaagaggaaggagacaggaaaagcggagcagaggagggaggaagaggggcgggagagacggggattgagagaacacacagaatttcttccccccatgctttgaagacaggatccttttttcttctggccacagacactggatttctcctgggatttagctgcttgtgccaccacagctggcgctccactggggagagccaaaaaacaaaaaaactaacccctcaaaggaagcacttcctttatatggactgaatcgtgtcccccttgagactcacaaaatgaagccccagccccagtatctgagagtgtgactgtatttggaaacagcagctttaaagacgtgattgaggtaacatgaggccatcaggggccgcaatctggcctgtgccctgataggaagaggagactggaacaggacacacatactgcaggaggcacagagcaaagacgccacctgcaagccagggccagaagccttggaagaagcacctgcacacctgaatcttggactccagttttcaacaccgtgagagagtaaatttccattgccagccagtctgtggccatctgcaatgactctagcacgttaatatacccatctaagggttgcctccccgagtttttattctcttcccagtctgtctgcttttgtggatgtctggagctcttgagcagttgctttctgattttgcccagagctttcagttgcaatcagcgagaaagaagctgcaggaacttgtttcatcttgaccattcatacatattgaactgatgtgtttgttacattctaccgtctcttgagtgtaatcaaataaaagagcatctgatgtaataggaaaatagagcaggctttgctaaccagctcatcctccctccgcagacaccacacagaacgttggttcctggaggctccaatccatgttgaggattggcataatgggaacggaatgatcttgggtcataggttttgcttttttttttttttttttgcttctattcagaaaaaattatactttagaattctgattaaaaatctgagaaatgaaatgagcatgccttttaaaaaatgtttcacaagaacattgcagttttattctagaagttgtagcagggagattttggcttcatgtaatagaaagcccaatgagaataagattaaacactaagggaaatgggtttgctgcatgtaaggaaatctagaagtgggcatggcctggactggctaatccaggggattagccaactctcttacctggggaaagttgcggatattttccatgtaaattctcctgagtcctgcagcctcagtgagaaagtgtgcatgtgtgtactcacgtgtgtgtgtgtgtaatgtgatgtgggggctttggacaatccattctcttctgtgcagaggtgaactttcactttggagaaactgaacaactgtctgagtgagagcacactcttatcatcctgtgtgatcagtggcactttgctaatgatccaagaagtgagagacaacaggtggagcagaaattagagtccaccaggccatattactcccactggggagggctgcacccagtgatacactgaaaaacctgtaacacgtcactccctgaaaaaggctgtgctttgtagcatttgtcaatttccgtggtctaaatattgacccactttttgttcccaacacaatgtccctaaaaatggcgatgggaagctttgcaccccaggctcttatgagccggcacgagctggctccagcacaccactggtttccacttgaaatagtgagaatatctagtttttattgagaacgtggctgtgcacagcctagaacaggatttctcagcctcacttctacaggccttctgggctggcacatcctctgttatgaggcctcactgtccatggtaagatgtttggcagcatccctggcctttacccaccatgggccagtagtattctcccagttgtgacaactaaaatatcttcaagctttgtcaaatgtcccctgtgggcaaaattgtgcccgttggagaaccactggcctagaagaagggtgagttggctcagtatggaagctgtgtatttgttttgaggtcctgctaacatttgaaggcaaagagaaggcctgacatttgctgtgggcttgggcttcataaatgcccgtcaaagaatggtctatgcaaaggcagtgatttcacatatgtctgaatgtggatttatacatttttttctagttggtgtgtgtcaggtgtagaatccctacattctgtttgctctataaggtagtatttttaacagtgatttaaacattttaaactattgatttttcatcatagtttttgctccagtagaaattaggaattgatcaattctttttaacttcaggtgtgcaaagcaattggctgattaaacctacaaatatagtagaacccttatgttattttctggatgagaactaaatgttaaaatttgagaaaggtgaggacaaaattctttatggatcttggttaggggtttcaaatgtcaatcaagatataaatgagatgaatgccttgtggaattaattatttttatgactgtgttatgatatgaaaatgttatgatagggaaaaatgcaagaaactgttacccctgtaggaatattgactttgtagccttggttagaagacaggctctgatggaaaaatttgctatgatggattgtgccatggagacttgactctctctacatttatggcactgaagccacctctgtggtgtgcagtgtggacgcatgccacgtctctcagacgaagcacacctggcagtgggcaggccctggctgtgccctgctgctgtggcctgccccttcttcctctagtaaggcggggaccctctaaccaggcagctttggactagaccagtgctattcgaagaatgatctggagacagtgaccaggagtcctttgtggacctggggacctaacattaggaatgataagtccagaaactgagcatttagaaacttgtaaagaaatttgatgttgccatgtgaagtaaaaatgtggtctgttttagcaattcatttattttgtagtttttaatagtgttggtctacaatagattaggaaaaacaaaaccaaacaagaaaccaaccaacctcctccaaatctggttcttttcctccaaatactcagagaagcacaagaatagactgtttacaccctggagagtcttgcacagtctgtttccagctcatgcaccatgaaggctgctatgagagtaataaactgtgtttctttcaagggaggtgatgaaaattggagaaggtggtgaggatgcttgattgaagtgagtccacagcaggcttcacagggactgtggaggcctctgccaggtgcatgtccagccccctcagcttctttgtggacatcctgggcccttcagggctctctcggggtaaggcgtgagaccagatcctcacataacttccaagagaactgaaaccaggacagggatgcaacacactcaactgttcactctccagaacgattttcagcatttcaggtggaactgaaatctctcggactctgaggcctgctctcttgtaacctctaacttaagtgctaaaaggtatactaaatgcattttcagttttgttgctatatttgcaagtgtctgaaactctgcctatagttcataattgtagataaagaagtaaaaaaaagaaagcatttgttctgttgaaggtaaaatatgcccacatgtcatatgcaaaatgacattgatgtgagagccatttcctctcatttacataagacaaagttccttccatgccaaacttctctagaaacaatatctggaaaagcacaggtgaaggagaggtatgacagaagaatcccaaactggatactgaacgcagaacttgttgcccttgtctagcaagttcagattgccataaggaagtcaccatgagtggtaggttaaatggccattgctacattaaactttctcttaatatcacttcaaacatttaaaaatatatattagaagaaatgctaccattttcaattaattctattttactggtttctctttctgttaatataaatatgcatagctcttttcttcaaatacaaagctgttggaaatttctaggaactaattatcaagaggaagaagaatattaacaatataccttgaagtttgtatttcttttagtcatagcatttttagatattcatttaaacatgaaaaatattggaacaatcttgttttaccaacaaaacaacagattcctagatataatttttatttagtcaggcttctcatttttttcagtcctcaattcttttttcttctattgtctaaaggacatcttaccatgctgcatccctgttgtcttcagtaaggatggcaccaagttcaagagactgaagaagagacctggagccagtgaatgagacatagagtttactgaggggacttacatacagggcagtccactggtaggaggctggacagcagaagtgctaccatttataaaaagcatgcagtttatacagactaggtgagtctgcatgctcagggtatgcttaaattaagttattcctgtcaggtttgtctaccgtaccctcctccccagcagaccctggaatgccgctcacattctcaccgtgtcattcctccacgatttccctgggccaggtatgggggggaacattgcagccagatctcatagcagcaacacaaattacaacaaaacagaataacaaatacaataacagtcataacgttttcccaagtgcttgggagttgaccttacatgctcagtggcaggcctacggtggagaggacagctcttcgcacacccaacagtctggatgttttctggagagatgccaccatctgcacccagttggcaaagaggtttgctgcacaccatccaacaagatgacacccaggtatttgattgataagcctggcccctggactttgtgttgaccacccatcctctgttctccaagtgagacagcaaggtgattgttgcagtttgtaagctggaaaaacactcgaagttaatggaaaacatgtaccctccccctctgggatgatatttccaggggaagatggtaaaggcccgttgttcttatgtttgagggagcgaaaatattttgcatattaccaagtgactagtgtcacacccagtgggtcaccctgctggccctttggttgccccctttcctttggcgcccttgactttcatccttgtagcatgtaccccttgcccatgcagtttcttcatgtctcctaagtcagtggctgctcgggccactggagacactggctgtcctgcctaagggttcaggagagacactagcactccataccactgactggatgctggctctaatctttcatgctgccagtgaacaaaagctgatttttggaaactagatagtgctcagcgtagatagcatgcttccttcttaattcccagaggatgtctggcactttcgtcagtctggcgttgcagaggagatgtggggatgtctgctcagcatagacagtatacttcattcttaattcccagaggatgtctggcattttcgtcgtaggctggcattgcagaggagacggggtgggggtggtgtctcactcatttggccagttccccttgcagccacaaccacccagctaccataggtatggctcaatcctcattactggagctgcagcggtgctgcctcaggaccgggtggcttgtggtggacaccattccactcacctcaaatgcagagatacagcacctcatgtcccctagtggtagaagccacccgtgatcagctctcccccttcctcctgaaactatttcccagctccaccagttccacagtggtgccaccctgcgctgtgtcatgctgccatctttcaggcaggggagacagttccacagtggtgctgccttgtgctgtgtcatgctgccatctttcaggcaggggagagagttccatagtggtgccgccctgtgctgtgtcgtgctgccatctttcaggcaggggagagttttgtgggtctactccctgagggagtgattggcctgcctttatcttggtggtgaccactagatgtgcatcgggggctgggaatctctatggacttatctcagtccttgtcctcactctcctcccagcggggctctccatggggccctaggacttagggccccaggatgattgggtcatgatagccctgactagtagatgtggcagtcagcgacccttcaaatgggctacccaatgatccagggtctccattttgccaccctgttctcacaggcaggacagtaagtctctgatgtttcaacctgagataatcttgtatctctttctggtcataaattgtcttgtacttgatgcacctttgcctgtgctgtgagctgagcctcagtgtctgtttggagtgtagtcaggagcagccgcccgttgtggctgccaaaacttgggcatctaaccttgcttagatagatatgccccctgccacagctcttccagacctctcagcattttcagggggttatcatactcactcatttggcctcatccattaaggatagtggctataaggcccacatagacatggacagccagcccagggtctctcccgtggatgtccccttccctgatcataggcatggacagctggcccaggttttcctccgtggatctccctttcctgatcacaggcatggacagccagcccagggtctcccccgcagatctccccttccctgatcataggcatggacagccggcccagggtctcccccatggatctcccattccctgatcataggcatggacagccagcccaaggtctcccccgcggatctccccttccctgatcataggcatggacagccggcccagggtctcccccatggatctcccattccctgatcataggcatggacagccagcccagggtctcccccgcggatttccccttccctgatcataggcatggacagccggcccagggtctcccccgtggatctccccttccctgatgctatcatcttagtattcacggggtttgctctgacttactggcttcctcaccagttgtgctggatccttattggctttggtaaggatggcaccaggttcaagaggctgaagaaaagacctggagccagtgaacaggatacggggtttattaaggaaactttcatacagggccattgagcggtggcaggctggacaggaggagcactgtcatttgtcaaaagcatgcagtttacacagatctggtgcaggtacattctcaggctttgcttaagtgatttccacaggtgcatctgctacacatatctccacttcatcataaaagcagaattgtgttcccctgtccttttcccagctttttcatatatgtaagtcgtgacataaaatgcaaactctggtcatttttatcctttttctgcacttttccacttatggctggcttgtcttcaagtctgtttcttcttctttcttatgttcagatatttccatttacttactctctcatcaaagtgccctagaaatggggtcagtagtggcttctgcacatagcactgaggttatctttctaaattcttcctctgtactatcctccataacagcacattagcttccatttgggtcaaattaacctcaacttatgaactttaatacccaccatcattacatcctcttgtttcattaggcaccatctaaaccaagtactttcgaagtaataaacataaaaagttaaaaaacttggaacacagtttttactatgactatttcgatttagattctattatttatgctcatgtgaatgccttctagtaagtttggccttcttgaatgcagtcatagcttgcacacgtatggaattgctgggtcgtgttttattttgtgtgtgttttccttgcagttatccaatgggtcctgagagagtgtgttggagtctgaactgccattctcagcaagtgtctgacccttaaccctgagccaggcagagtccggggactaaggttccatgcaggaatggagtggggtagcccatctcatggaggaggagatgagacataggcaacaagatgtggttaaagacggacagggggtcagaaatcaaagaaaaagagaaaatcaagtatcatcatctctcaagggtcggggtaccagaaagaaagccaacttgaagcaatgagtatttattgccagttataactacagatagctgagtggggagagaagcgttggaagcaaaatagaagaagaaacccagaaatgtccaggtgtgcgaaaacaagtgccggcagtcgcattaagagtttactggggccttgaccgtggtcagggagagaaatggcatcaaggcagcttagagacgcgctgctgggaatttcagtttggctttcgtggtaatattagtacctggattttaacgaatacgtgtgcacttggcactgggctgatatttattcaagggccttaattgatgctaagaaacataattttaaaaaccactgttttctttatatttaatgattttagtagtagttatgataccagtaaaatattaatgttcattcagctctcctttgtgctggcatatccaggttttcatccactgtggctgactgaaaagcatggccatgctattttgtagctttcctatcgggacatgatctatttctccaccccttcactctgggctgaacttgtgatttgcggtgactaacagaatgcggtgaaagacccccaagaggccttgcctcttctgccttcactttcctgggacgttgctgccttcatgagaggaagtcaatgatcctctttgagactgaaagacgacctggaaaggaggagctcttgcggttcacccagctgagctcagcctaatccaacacagctgaacccatgcaagatcagcaaaagcacctcttggcccacccagagagctgtgagaaatgtaagtcagtccgatttggggtaccttgtctggcagtattgaataactaatgaaccttcaattttaacaagcctgccctttggcacacacactcacccgcacactgattcaaacaacaaactatgcgaggcccaggacgtgaccaggtggcatgtcagtaaatacctgtttccaggccctttacgaacttttcaatactcactagagctgcacaaaaattgtgctattgctacataaagattggctatgaccattttttgtggagagacaatttcacatcttgaaaagatatagtttttacccaaatctgggattccacacccaagacatggctgctcagaaacaattgcgctgaagagattgattgcctcttggttgttgtaggctcaggggaggaaagatctgggtttgaatcactggccctacaattaacaagatgtgtggcatgggaaaaatgcctgactttctaaatcttcattgcacctctgtaaatggaggcaaataacattaatcaatttaggttattttgaaatacatagtaaaatcactcaatctagtgcctaccacataccaattttcaaaaactgtagttttcctcccctggtacagtgcttctgtaactgttgtaccattacaatctgcaccaaaagcaattggagtttgtttaaaatgtgggtatccaggcccaccacacagtggtcagttatattacttttatctcttataatccatttttcttgattatattattttaaaatatatgtgacaccaactagaatggctaagatggaaaatacagacagtattaattgttggctaggatgtggagcagttgggactctcctactctgctcctgggggtgtgcactgctgtatttactaaagctgggcataactgaacccaagaattccaatcctaggcatattcccaatggaaatgtgtgcatgtgatcaccaaaagatagatattattaaaatgtttatagcagcactctttgcaatagctcccaactggaaactactaggtgcccatcaacagcagagtggactttttttgaagctgggatacaatgcagcaatgagcatgaacaaacgaccacacactgcagcacaggtgcatctcacaaatgccatgttgtagacaagaagcacatacaacagtacatactgtacaattacattgacttaagcttaagaaatggtaaaactggttgggtgtggtggctcatgcctgtaatcccagcactttgggaggccgaggtgggcagatcacgaggtcaggagctcgagaccagcctggccaacatagtgaaaccccgtctctactaaaactacaagaaaattaaccgagtgtggtggtacgtgcctgtagtcccaactactcgggaggctgaggtgggaattgcttgaactcgggaggcagagtttgcagtgagccgagatcatgccactgaactccatcctgttgacagagtgagactccatcttaaaaaaaaaaaaaaggaactggtaaaacaatactatggtcttagaggctcagagtagtagctacccctgtttggggtagtgacgggaagggcaccaggaaggttttgggggtgcagtaatgctctctgtttcttgatccaggtgctgactagatggctgtgtttgttttgtgcaagtttgttgagctgtaccacttataatccgtccacatctctggatgcatattatactaagtaaaaagtttacgttcataaaataaaccatgggacataaaggatacgtttttgcaaacttcctttatgtctctctaaattctcccctgcgttcctctcttcaacatgaatgtttggagaactaagagaaagaaacacaaaccctgactaacttgaatttagtattttttgacttacaataggtttattgggacgtaccccattgtaggtcaaggagtatctggacttacaatggtttaccttaggatattttgagtttatcatgggtttatcaaggtattaaatgcattttgatttatgatattttagacttatgattagtttatcaggctgtaaccccactggaagtctaggaggacctgcattctaattttaaaaatatgcaagcctgtttacatatttattttatatttcttcaccacatctacaaagcagaccacaattagctttgtaaaaaaggagatatggaatctaaatgttccaggacatagttgtgagagctgcaaagatgagtcgattgattttgttcggggtcctccttcttgctgatgctggctgaccttgtttactcagcctccatccttgggcctggtcaaagagtattgccgactagcctgcctcttcctcatctatactgtcataagactatctcttttttgtccaggtacccctgttgcagtcttaaaggttgtctttcaaaagttgaaagacacaaaacttgatgtgatctggctgctctaacttgattctgtgtttttgcagaaaaaccctccccaccattctcgtctcccgaaaagcattcattaagggtttgaacgggatggaaataattattaatctcacctatttgctcaatgtgttgcccaggctgcaactcaagtctatgaatgtctcatctgcccattcacagcgattcgaaaacgagttttaaacagtagaaccattaattcggtgaccttttaggcacacaacaccagccacctggaatctctctgtcagttcacagtgtgtatttattttttttttctttttgctcacaaagcagaaaagtttgcatgagctggcgggagtgagtaggggtgaacggaatcaacatttgttgaagtgttcatatgtgttttaatgacattgtgtaaattattctatgtaaccctcacagtatcctgaagggaagataaaagcattttcattttacaaattaaaagaataacctgtgaggcaggctcactgtgagcggtgactggcgtgcctgagtctgtggagggagagcacactcccaggcatcaactcacatgacgcagatttgatacttgtggataggcagcaaggaacaacaggagtttgtgggagctgcttcctcgagactcagaaagctgccggggtggatggagctttgactgtgtgtgcccccgttgtgctgtagatgagggaccctgaaaagcagcccaccctgggttttacaccacgggggaacatgatgcaaggagctccagaattgaaggacgtcccgtttctaggggagggtgggaacagagcctgagaattccagcctgctcacccttatctcagagtgttgcattcccaggacatcttccaaggccacctggagagctgtcctgcagtgacacacctcagcttacccagcgtagaagtgaggggctcagattcagcatccgcagctatccccaaatgccgtgattattattccaccatccaaggctcacagtgagttaactgttttctttctcctgtcattcaggagcccaagggtggtggcttcagcaccctaggaaatgtgccagcaaggtctacagtatcagcaactttacctctccctcccaaagctttctggagtgcttagtagaagacagaggactctaaagtgtgaatgtggaatggaaatcgaggccactgggaacggctgcgtcgaagagtaacttgggaacgcatagggattcacaggatagatattgtctggatatcagggcgaaatgttaattagggatcaaaatgtccttttaaattagctatgttgaagagaaaggagaagaccaggaaacagaagaaagatatatgttatgtggtattttggaataaatatttatagaaaacaatgatctgtttgtttaaaaactaccgatctaaaatgctgccccgtctcatcccttcttcctgctttattttccttctcactgtttattccctgacatgttgtaaactacacttatttatcttgcaaatgtttcctactagaacgtaaggcccatgagggcggacgttttgcctcattctctttggaacagtggacacacagggacttacacaaatatctgttgaatgaatgaatgtacgcttcacatttgatgacttactaatgtaatgatgtctgaccaatagataaatctttttccgtattaactgattggacatgttccttgaagccatcactgggggtctgctctgaagtttatggatcactcaggatggtgggctcagggctcaggtgggtcctaggttgccttgttagtatcagtccaaggtgtctatcagagttgctaccaaaaagacgattttccaagtcttcaaaaatgaactgttagggaggattatgctggatatttatatcaatttctggacactttaaagctatgaagacagatatgaaaataaaggttttattcattttagggggctgagacaaaaatagacaatttgaggaaaatataaatgtatccatagaggtcattgttagcacctttcaaaaacttgttttggtcgcctaaaagcataaagaatctactgtatatggtaaaccagtattcagggtccagccaagaaaacagaaacaacactaattattttagtacacagagatttaaatgtgggaaattgactaaatagaataaaaagggggaactgaggtattgcagagagtgaaactgcaggggcagccaccagctgtctagggctgaggaacaaaggaaagaagttggggttactagaatccagaagctggaggaggggtccccagagctggggctcagtcccccaagaaggggcactgcccagcttgtgctcaggcctttgagaggctcatggggagggtgtctccgggagcacaaaaagaagccaggcatgggaactgatgttatggctactgaccgctgctgccagggtgaagggcattgctgagcagcctgggtagatgacaacgccagtaggaaccggtcccttctcccaccacctgcctcccaggctccctccggtgctcctgaccctggcaggaccaacctggatgccgttgacaaggagggaagcttgtcaagtcctaatttcagcatctgaccgtgacaaattcaaagctgagaaacaataaccaaagaaccagaatatatggtaatccatttgtagcaacgtaactataggttcctaaaaatctttaggatgtaactatcataactgaggaactaagtctttttggggacaagtagaatggagtggaaagataagatcagaatgacaaaaattcaaggaaacattagcatagggagtgtgtgggattattttttttaaatttacatttggtaaaataaaatgaaacaggttgtaaattacaaataatggagaccatataataacacatttctacatatttatttttttaaactttttatttgagaacaatacttacagaaaagttgcaatgaaaatacaaagaacacttatacactttacccagattcactacgtgtgttaatattataccaattctttaattattttttctcacacatatatttatatgtatacttatatacctctacacttatttgtatatgcatttctttttacatatttgtatgtttacaacatataatatatacacattctcatatactcgtatataacctgctgtctgagatctaattcatcaaatgacccaataatatctttactaggatttgtttcccttcaggacgggctccagttaagagaggattgcagttagctgtcatgcctctttagtgtcctttattctgaaactttttcacagcatttcttcttactgttatattaaccttgtgaacaatataaccctccctttttagaagatgattcctcattttggatttgtctgcagttttcccgtgaccagaaacaggctgtgttcctgaatgcgatagtaccaacgtgacgctgcggtagtaccgacatgatgctgggttgtattcagggcctcgcagctggggacgcacaatgtccctcatcagtgctgctgatgttgttaagatgtcaacttggtgtccagtttctccatgataaaattacgtgttttctcttgcaatcaataatctgtgggaaatatcctaagttctgaaaactataaaaatatcccatgcttcatcaagatttcccctgaaatttggcatccactgatgcttcttacctgaactaaggcttactgtgatgagtgaaaaaccatgattctctcactcccatcttttctccatgtttagcaggtcaacacctggtgctccagtgtgagcaagagcccccctccttcctcctactttctgcatgtttagcaggtcaacacctggtgctccagtgtgaacaagagcccccctccttcctcctactttctccatgtttagcaggtcaacacctggtgctccagtgtgagcaagagcccccctccttcctcctactaaggtatgtcttcgtttaatgctctttattatccgtaaaagcacatggattcttaattgttcaatgggtaatttagtatgttttttagttctcttggtgctcaaactgtcccaaatttagccagcataagtcccttcaaatttctccccgtagttttacaaaatgccccatcaatcctttgaacacttccttaatatatggcatagaaaggtattccaggctcgtcttgcagttttcctgtcccagccctggaattggctatttctctcagaagccctggttccttttagtggggaagagtattgacgatctgggtctcagatgtgcttactgctgttggggtatctttgcttataggtatagtcagagaagtgtccccctcctgcattacttctactctgttctctctaccctcctagataaccaactagattgtttgctgtttttttaatcttatgtttctttttgcaaaactatacacctgtgtgtttttatcttacatatatttttcttacatgaaggtagcatatgctttcatgcattttccttttatcctttaataatagctcttggaaactgctctacttccttttgcagagatcaacctcattcatttttatagtttcgaaatactccattgtgtgtatgtactgtagtttattcagccaatcgtctatgcttggacacttcagtaattccaaacgattgcagtaaaagtcatgctacaagttacgccctcatgcatgtgtactttagcgtggttggaagaggtttttccagggaatttcccagaagtggggttgctagaatgagggtaaatggaaatgcaatattgctttctagccaggcacaatggctcatgcctgtaatcccaccactttggagggccaaggcgggctaatcacttgaggttaggagttcgagaccaacgtggccaacatggtgaaaccccgtctctactaaaaatacaaaaaaatttagccaggcgcagtggcgggctcctgtaatcccagttagttactcacaaggctgagacagcagaatggcttgaatccgagaggcagaagggagctgagatcgcgccactacactccagcgcaggcaacaagagcaaaactccatgtaaaaaaataaaatacatataatatatatatgtgtatatatgtgtatatatacacatgtatatatgtatatatgtatacataagtatatatgtatatgtgttatatgcatatatgtgtgtttatatgtatgtatatatgtatgtgtgtatatatgtatttgtgtgtgtgtgtgtgtgtgtgtatgctttccttcatagggactgtatcgttttgcattcccaccaagagtgcgtgagtggacttttccccctacagtttcactagttgtatgcactgtcaaacgatttttttgctcatctgatgggtaagagcctgtatcgcagtgtagctttaatgttcagttatcttattatgagggaacttgaaaaatctttccatatactttcaggttcttttatatgtctggttgtaaattgccttttcctatcttttgttcattcatatagaagtgctgttcatttccctctatttttaaaaatattttttaaaaggaggattaacatttcctccttttggaatttaggttaccaatgttttgttatagtttatttgtctttcaactttgccctgtacaacattttattgttaaataatcagttaccagtgcttatcacatctggatttgagtaagagtcagaagatctcccctagacccaggttaagaggtacagagtttctgtctgggatgatgataaagttctggaaacaggtagtggtggcagttgtaaacactgtgaatgtacttaatgacactgaattgcacacttaaaaatgattaaaatggtaaagtttatgttatatgcattttttaaaaggttaaattcaactttttttggtacttgtataattttgttacatttagacctttgacacttgggatgatattcttttgaatggtgtaaggaactgatctaattatgtatttttctaaattattattcagttgcctcaactttatttagtgaaaagaccatctttgctgcagtaatttgagtacaaccattagagtatatcagatttccattggagatggatctatttcttgattctctattctatcccatcccattggccttttcatacactaattccacactaatttagttttacaggctttacagtgtattttgatgaggcaaaatctagtttctattcaaaacatctccttttctcctatttttattctgagtttaatcaacaaaattaaatacagatatactacatatatataaatatttatcttttttctgttcttatttttgtatttatggctcacagtggcctttgtctttccaaatgcttctttgaggatatttaattcactttggagtgttgtgttacagatttattgtttgtgtgcatgtattttttaaattgggtaacagcaaaaatggtttgctttaccttaattgttttagggtagttccatttgggtgtggtttgtttttcctctttgtatccattttgcatggatttcagtatgaacttttctattggttctgccccctgaatgcgctgttttcttattggacaattgtggagaaggattagtgcttttgttttgcttttgtctctgcaggatactcaggtttcacttttttattctgtccctcagggcctcccttcccaggggtgcccctcttttccttatgtctgactctcccgtaggtgaaacatggggcttaccgcttttggtcctgcacatttacaagcctcttccctgcctccagtcccgtgaagtatctgtaccctgcacctccttctgaggtgagattgtctgtgctttgtctgagtgcatcacttcactctattttttttttcatggaatcttgtggcattgggtgggcagtgggagctccagtggaattaaaggtaatatgaagatcacagcccttggtttctcagttatgtggagggtgtggattacgaatatggttgcccttctcgtggattttattatttgttcttgggagggatagtgaaaatcaggctattgccacattttttcctgttacaaatccataagtttgattcacatttacttttattctcaaggtgactttatgataatgatcagaggttgtatgagtgttgagggagcaggaagggaaatttgtggactattactgggaaagttaactctctgtaacctcttcctccggcagcacatggatctcactccctaggctggctggggtgcagtgttggagtttcacgcacatgcagggtcttatactcaagatccatagaatctaagcacacagcattgcaaggggatcccatgctcctgaacatgctttctaggttctttccaagaaaggacgctagtaacatcgtattggaaccttttcatatctttacaaacttgtagcaaatcaaccaaactttattggaaggcctattgtttctgtacacattcaaagtagttccttaaagtgtttagtgttttttaccagtttattttcatgaatctttttttaaacacacgtcttaaggatcataccgtgttttttgatgctgcagttttccgtctatctaattagaggactctttccaatactctccctggttctgcatttcctcagccgccatgagcacattctattctatggtcattggatcggcattttaaatcctgtttggcagaaagagagtttcatgtttaggtccaagatgtaatgggtctctctaaaggacagcatgacatttcctgcgtaaaacaactaaaatccagaattcacttcctggtcaatatcgtggggactacctaagcagcatgtgagcacacacacacacacacacacacaccacacacacaacagaaaagtgagtgataatcgattttaaggactaactctggagccagactaactgggctctgattacagctatgattacagctctggtggtaactagctttacgatcttgggcacattatttaacctcttgtccctcagttgcttcatctgtaaaaccgagataacaattgcaattatctcataaaattattggaaggagttaatgaattagtatcagtaaagtgattggaacaattcctggcatataataagccccacatatatgctatataaatgctagttaaatgactagttaaacacacaatgaaatgtaataaaagaaaataaaattaaagataatatattaccagttgggtagatggcaacagagagaatgaagacagagatgaataatcagagatctcttcaacctggagagatattccattatacgacatggtggcaacttgagtggattaatatgtatatgtgtgtatatatatatatatatatatatatatatatatatatataattcccacatttaagaaaaaaagggattaaaacagaaatctgtacccattcgaattttgcataaagagaaccatgttgagaaggaattactgtactttggtgtgctcataaaattactatatatttataatgatttttaaaaatatggactttagatgacaatttcttaatattgcacctgtacagagacatttggagaaacaaattaaacctttatagataaccttaaatatctgaatatgtatagagttgaatgatgggacaattgagggaaggggtagacagacattaggaaaaacaaattaaacctttatagataaccttaaatatctgaatacatgtctagttgaatgatgggacagtggaggaaagggtgtagtgagcatagtttgaatgatggacaatggaaggaaggggtgtagtgagcatagtcagttggaatgatagacaatggaaggaagggtgtagtaagcatagtcagtttgaatgatggacaatgataggaaggctgtagcgagcatagtcagtttgaatgatagacaatggaaggaagggtgtagtgagcatagtcagtttgaatgatggacaatgataggaagggtgtagtgagcatagtcagtttgaatgatggacaatggagggaaggggtgtagtgagcatagtttgaatgatggacaatggaaggaagggtgtagtgagcatagtcagtttggatgatggacaatggaaggaagggtgtagtgagcatagtcagtttgaatgatggacaatggaaggaagggtgtagtaagcatagtcagtttgcatttgaaagtgatgctgaagtcctcgtcattgggatgccagggggtctaggtcacagaacatacagaaacgtttgtgtgtaagtgttgtgtgcatttgcacatttttcatggggaaaagtccatctgatgatcaaaaaagtgtgtgtcccggcaaaggtgcagaaattattatcatttgattttctggttaatagtatgttaaagtattttaaagacaatcgactactcatcatttcaataagagaaaatctaaaaattacccatcttgtatgaaacaaagagaagaatcagagaaattaaatatacacttactattccttaaatgttatttttcttccttttatttctcttctatattcactgttggggcattatattgatttttgttttctttttgtaatttggaaagcagctatgttcactattatataaacaatgcttgagagttttcttatgttgctattaaagtttgtgttcaggtaaattacattatctaatgatttcatttcaaggtaaaacacaaacagttttatgtcttaaagagggccttggtctgataggaatgagaaccactctgccatgccctatgcgaacaattctaattgggtaaaatctaatactttgcaaactgtcccaagagagcttactgattttagggcagaagaaaaagtttctatgtagaactctatgtttgagaggaggagaggggctacagctaagtatagagaaaaaacaacgttccataatcaagaaagaaaaaggtggaatctgagtctgtctttttcgtctttaccgctgtgtgtgtatgttctataccatcatgtctcatttttctttatgtcttaaagggcaatgtgtgcacacagcaggcatatatgtgttaattgattcatactccacacaatccccatttctcttgttcttatcccacccacaatggagttcaatagagctaacagtggaaaagataatgagtgggtctaaatttaatccccttttgtttaagctaatctccctctctaattaatggctgttcataccattattgctcacgaatctggcgaaagttctctgcatcggcgcaggaagcactctgtgaaatcatgttgtcaaagggaacagcatagtccagttcccattgcatccttggtgacttttggcctaatgaaaaaggtgtgtggaacatggaaaccagaaggagccctctgctgttagtgcagagctcctgctcctgggttgcattctagctttcgtcacacattttaaaatccaaatgtaagaatgatgtacctttgaaaagacagtgggttacaatgagggactgaaggagtgggcagggtcaagtagggagggaagagagagaaggcacaagaggagctgtgaggaaatatctcccagcctccaccctcaccctccctgagcttccgcagggctgaggcttcctctgctgagctcgcgccctcaccctccctgagcttccgcttccgcagagctgaggcttcctctgctgagcttgtgccctcaccctctccgagcttccgcagggctgaggctttctctgctgagctcgcgccctcgccctccctgagcttcgacagggctgagacttcctctgctgagcttgcgccctcaccctccctgagcttccgcttcggcagggctgaggcttcctctgctgagcttgcgccctcgccctacgtgagcttccgcagggctgaggcttcctctgctaagctggcgccctcgccctccctgaccttccgcttcggcaagattgaggcttcctctgctcagcttgcgccctccccctcccggagtttggacaggactgacgcttcctccgctgagcttgcgccctcaccctccctgagcttccgcttccgcagggctgaggctccgtctgctgagcttgcaccctcaccctccctgagcttccgcttccgcttccgcaggactgaggcttcctctgctgagcttgtgccttcaccttccctgagcttccgctttggcagggctgaggcttcctctggtgagcttgtgcccttaccctccgtgagcttccgcagggctgagggctcctccgcggggctgagggttcctccgctgagcttgcgccttcatcctccgtgagcttccgcagggctgagagttcctctgctgagcttgcgccctcaccctccctgagcttctgaagggctgaggcttcctctgctgagctcgccccctcaccctccctgagcttccgcttccccagggctgcggcttcctctgctgagctcgcaccctcaccctccctgagcttccgcagggctgaagcctcctctgctgagctcgcgccctcaccctccctgagcttcggcggggctgaggccacctctgctgagctcgcgccctcatcctccctgagcttcggcggggctgaggcctcctctgctgagctcgcgccctcatcctccctgagctttggcggggctgaggcttcctctgctgagctcgcgccctcaccctccctgagcttcggcggggctgagggcctcctctgctgagctcgcgccctcaccctccctgagcttccgcagggttgaggcctcctctgctgagctcgcgccctcaccctccctgagcttcgggggggctgagggcctcttctgctgagctcgcgccctcaccctccctgagcttccgcagggctgaggcttcctctgctgagcttgcgcacttggagaagccccctctgggtggtgatttgtgtgctgcagttcactcccacagtttgacacacacacgcacacacacactcaaagtcggcaaaggcaccagcagcagtacatacatgctttcctaatagaatgctgcttttaataaacaggcaacctcttactcttttagtttttgtggacttcattgtttaaaactgtaaataaacaaagaactctggattcctcatacatactattaagtgttagtgtttcctttactggaagccttcaatgtatcagaaactgtgcagggtgatagggtacacagaggccaaatccaaggctactgtcttgcgggaactctcaagccaggtacttagagacggctgtgtattgcggacctcagccacggagggctgaatttcacagaaatcttggtatatatttgtcacatgtgttgcttaattaacatttccaaatagtaattttagtcacctctagaataatctaattatatgcacagtcacgtgtcacttaatgaagggaatacgttctgagaaatgcatccttaggtgattttgccgttgtgtgaacatcatagagtgcactcatacaaacccagacggcacagcctcctccacacccgggccacatggtacagcctgttgctcccgggatacacacctgcccagcaggggacgctactgaacactgcaggcagctggaacataatggtacgtatttatgtatctaaacataataaacagagaaaaggtacagtaaaaacatggtataaaaagtggaaaatggtacacttttatagggcacttaccacgaatggagctagcaggactggaagttgctggggtgagtctctgagtgaatggcgagtggatgtggaggcctgggatgctattgtgcacccccttataaacactagacactcatgctacactaaatttataagaaatactttttcttccttcaataatgattaacctttgcttactgtaatgtcaaactttttaattacaaaaatgactcgtaattacacttagcttaaaatgcaaacacattgtacagctgtacaaaaatattttctttctttatatctttattctttcagcctttttgtatttaattttttttgactctgtaaactagctcatcataaacaaagtcacaaacacctacattagcctaggcctacacagggtcgggatcatcaatagcactgccttccacctccacatcttgtcccactggaaggtcttcagggtgataacatgcatggacctgtcacagtggatgtgaatatgcaccactcatactgtgggtgaaaatgctttcctagggctatacactaacctttacactcaaatgcagtaagttgtgttagctgtattgttgagcccagggcttggggacacggttacaaagcacagacacttgtgggttttgatcatatgcatctggaaaaatacaatcacttatttgggtagacaagtattatttgtgtgttttccttttataaacacttatcaaatgcctactctttgctattgtgttggttttggtgatagaaaccatatggtcccatcttcaaagagttttcagtctaggaggggaggcagcttcacgaacagtgattgccgcagaatgtggtcagtgcatcgtcacgcatccaggcacaaccacggcgtgatgcggggagcggggagccatgaagtcggacaaaagcatggaaagaaagatcttcgaaaaggagggggcctgcaaaagaactgaaacatgaagagccgttgaaacaaaactgacaggcaatatggtcaagttcctgatgacccaaatgatcactcattcaggcagtttggctcaccaagaacagacctgggggtggcctgggagcaggtatcagactgccacaggttaacatagagaagcgaggtgatgctggatgcagtgggtcacgcctgtaattccagcatgttgggaagccaaggcaggaggatcacttgaggccaggaattgcagaccagcctgggcaacacggtgtgatgtcgtcactccaaaaaataaataaaagattagctggatgtggtggtacgtgcctgtggtcccacctacttgggaggctgaggtgggaggatcatttcagcccaggagtcccaggctgcagtgagccatcatcacgctactgcaccccagcctgggcggcaaaacaagaccccatacctacaaaaagagaaagaaaaaagagaaaagtgaggtcatgcagtgcaggggccttcctgcaatcctagatcttgatgactcctggtgcttctgttgtcaggacactcattaaaactcaccccatgagcctctttttctaccaccgtcaccccctgtgagcttccttttatgctaccatctgccacgataagcctgttttttccaccatcacacccatgagcttcttgagctcagggacatgtctcatttgacttggcacctatgtttgctattacgatactgtgtatttataaggcaccacaatgtatgattgttacatcaataaatgatcagcaaaccttgaagatttaattgggaaaaaaaatcagcttctgtggcaagtcaagagcccacaggaggcagctactggggtcagtgctgttgagactgcaaggcctgaggagctggaaccatgacagattggaaacagtacctcctcctaccacaggctttattcacaagtataatttattttttctgtgtaggagcttgagggatttcagagcatgatatcgagtaaatgtattttacatgttattccttccttggcatcatggtttgagccattcaaatgtcttcataatcaaaagcataataaattatgactaaaacggtgtacctgtgaaaacgtccttcgcactctccccagttggaggctgtgcttttatggtcgcagacagcagggttgtttgtgagaacagcagggctctgcagctggagctgagtcagaagacgcctggcctgcactgcggaggtgcggagaccacacaggtcggtgtggctccatcgcagctagaggattctgggacataatatccgctctggactgaatgtttaagtccctcccaaattcatgttaaaactctaatccccaggaagacagtattaggcggcatggcctttggaaggcgattaggccaggaagggcttattgcccttataaaggagagggctcctgtccccttcagccacaagaggccacagtgagaaggcaccatccagaagccaggacagtagccctcaccagatgccaaatctccccgcaccttgaccttggactccttcacctccacaactgtgagaaataaatccttcattgcttataagccactctgtctattgcattctgagatagaaatccaaacagacacagaccatattggtcgtataaagtggaatccagctggccccattgtcttggtcctgcaggggcaaccacatgcctgcctcagaggcatcctcttctgagacaaggtagcataaattgagtcgggaagtgacccactcttagctccatcctttatttcctgggtgatcttggaaagctgcatctctctggccactggtttcctctcctgtaaaatggggatattgggagttcttaggggattaagatatgcgactgaagcggctacattgtctggggtatataccctggggtttcttgttgcgtgccaggaaagtttgggacatggacacacacgaggagcttaggagtggaggtttaaaaggcagaagagaagagaaagagaaaacagctctctccaaagagaaaggggcctttgaggggacgggtggctgatgcacccaattttatcatcaggtttgaggaggcggggtctgatttccttagggctcagggattggttccatcaggtatgacatttacatagtgagcgggaaggctggtcgccctaccccaatcttattatgcaaatggcctttccagttgatcagtgccattttgtctgctccttacagtacaagtggttgacaaagagaagggaagatggagcccatcttgaacatgtctagtccctagttcctgccagtattcaccatgcaagctcccaggtggctagtctatgtctgcagctcaactttacaggctgctctttgatagaatatgatgtggggctgcttttcattgaaaacaaaggccttaccaaggactcccctaccctttctgtctgcctaagtgatttcttcttaactcctagatcactacgtagctaaaacaaatgatacctggaaacagttgaccagtcgttgtcatctttggatgtccctactagaaatgcacagcgctctgcccaccatatgatctttgtagttgttcccaccgggcctgaacctctctccccatcgccagcctgccctgctgtctgcatggctgactctcattcattccctctcaagcactgcttcccagagagtttctcagccgccctaccaaatgtgcagtccctatcacattaccctttttattttctccaccacacttcccaccatctacaattatcttgactgagcatttgctggcctgtccattgtctctctactcgtagtagaataaaaggtgattgaaggcaacaaacagcccatctgtcatcctcactgccatatttccaagccctagaaaagtacccgaacaaatgaagcactccataaatgctttttgaatgagtaagtaaatgaacccaaatgcatttttcttactaatcctttgaattatttttacacatttccaattacttatttctctttttctctacttccaaagaaaccgcagtggatactgtgcacgactcagaagctccaggcaaggataataaacatgccacatctgtatctgtggatgttccttcagcctgggcagaaaagatacagtcaggaagatacagagaaagaaacaacagtccatatgtgtttaatatttatcagtgtagcaaatttctccagtagaaaaagaaaagacaaagttagtttaattggatccagtttctttaagtacctttattttcccttgaagaaaataaaggaggagaagggacttagccaaataatgatttaaatttattctagtatttctgagggtgccaagtcaggaggttgctgaggtttctttctctttcctttgctgaggtaaatttccagctcaggcatatggactgacgtggaaaagcaatcagttataaagaaaaaatacatttggggtctgtctctgttggaaacataattgaaagcatgagtgttgtgtggtttctctcaaacttcaaaagtgtgctcaggcacatgaaggggaatgccatctgtttgttgttagggtcatgttttactttcctgcttacactttcaatatagtcaaagagctcagctttttataaagaaaattactacttaggtttacattagtggcaaatttactcattttcccttttccattagaagaatgttgttagataatagattagaacaatttggcaattaatcacagtcacccactcttagaaattgctcattggccaaaataattagtacaaacactacttagaaaagaaatgatccatcttttgtaaacctaagaacatgttggcacatttgcaatgcttgataacaatagcttttgtgctgcaatgtacaggaggtgccttgaaatttataggctgttggctaccagcacccatcatccacctcagcacctgcaggagccctgatggtcaataggaaggcatagagggaaaaatactgagcttcggaacttgaacctcagactcaggggcatgtagaaactagtccaaagtaacactattgcttagtggcagaatcgagcctggaatccagttttcctgattcctggctcagtgaccccacggctgcacgtgagggtcctgtggagttagtgtcctcccgtgctaaagtgacacggcttgcgttaatccatagaaacgttccatgctgatcccacagacatgtattgaaggcagactatgttctaggctgtgttagcgaagcctccatatagtcacagtattcatttcctagcttaattgttgtttgactattttcaaggtatgtcaggcctaacctactaattcctcattatctgcaatcttatttaaatacactgtgtcaattgagtgtttgtgatatgagcatcaattttgagataacagggatacaaaagaagaaggatccctgcctctaaagagctcgccaacttattatgtggaaataatggaccgaatgccactgatgcaaacgcaccttccctctaggacgtggctccttttttccttttttagttgttctttcaccacgtcagctcttctttcctggtctgctttgaagtcttcttctctcctcttccctctgctggttcctttagccctgggcttccctggggctcagtccaacgttccctcttctattctctcccagggtcatctcatccagtcgtacggcttctattatcatccatagcagaaattatgaacccagagtccatggataaacttttgggcctgtgagttccttgaaattatatgcaaatttggtgtatatggtcatagcttctgccagcttggcagaggggacctagactccacagctctactgaagtgggtgatgcccaggactgcatgttcctgagtgtcaggggccagctctgactggccctgggcaccgtggcttggagatctcacagctgcatgaagcttaaagcaatcttatctaattgcagttccccatcccctgcccgcatctctaccttccgcttttgtgtccctgtcatagtaagtagcatcatcaccaggttgtccaactagaaaccagggactttccagactcttctctctccctcattccatacagccatctcatgtgctatgggctctttctccaaaacctctcaaatctattccctcacctccatttcccctgcccggccctctcagctctcctcagcctttactggacacagcagcctcctggctggtctttcctcagtctcactcccatctcttctctctatggaggcaactgagcatgcgttttctttttcctttctttctttctttctttctttctttctttctttctttctttttttttttgaaacagagtctcgctctgtcaccaggttgggatgcagtggtctgatctcgactccctgcaatctctgacttcctggttcaagtgattctcctgccccagcctcctgagtagctgggattacaggcacccaccatcatgcccaactaatttttgtatttttagtagagaaagggtttcaccatattggccaggatggtctcaatctcctgaccttgtgatctgcccactttggcctcccaaagtgctgggattacaggaatgagacacctcgcccggccccgagtgtgcattttctaacataaaatctgatcatatcaactgggcgcggtggcggacgcctgtaatcccagcactttcagaggctgaggtaggcggatcacttgaggtcaggagttcaagaccagcctggcaaacatggtgaaaccctgtctctactacaaatacaaaaattagccagacatgttggtgggtgcctgtagtcccagctactcaggagactgaggcaggagaatcacttgaactccgaagcagaggttgcagtgagctgagattgtaccactgcactccagcctgggtgacataccgagactctgtctcaaaaataaatgaataaatgaataaatatctgatcccatcattgcctggctcagaagccattccagcgtactccagagatgaaaaccacaaggattgcatagccttccgtaaattgtttcacactctgtccccaagatcgtgacactcactgtaacctatcacttagcttctcaaacatgccatactccctcccatatcatgtccttgaaatatgcttctctcctatgctaccaacctccccttcctcgtccagccctccccacagcacccccagcccccacttctttcattcatcagctaactgctcctcattcttcagtttctacttctccctgagggaagatctgatttcctcaaggagggaagatgtccctgctgttggttcctccatagcaactcctcttttgtaatatctggaattcactaccttgtggtgatgtggttgtgcctcttcctccaacaaacatccacgcactgagggcagggctcacatctagatgcttgctttcgtattcctaggatctagaataaggctcagtactcagtaggtgctgtgcaaatacttagtgaggagtcaagagcccatgtgcatgggacagatagtgaagcacagttagagatttgaaaggaagtcacaccgttggttacagctgtcatccagcaagtagggcttaagcttgttcagaaaaacagatagggtgtggcttaggcaggataagaaagcataaaaaacaaaagatggaaaaacattttgggaaaagtgagctaattaaagatatgatcagtgaatagaggagccacaagttttaagcaaagcagaccatttcctacacataaaattaacagtagaaaaattaaaaaataatttattgctcacatttttggctttaaaggccatatagttaagttgttgcaactacttcactctgcttttgtgttgtgaaagcagccacagacaaacacataattgaatagatgtggctgggctctaagaaaactttacttctaaaaacagacatggagtctgccgtttctttagaaattctttaattccttgcttttacaggctaggcattaataaggtagagatggcagttgtctggaaactttttctaaaagcatttatgagttataatttaatggcaatgttatctctattagttgatctattataatttaatggcaatgctatctctattagttgatctgtgctctatcggtttgtctatctactgaatacatactccatttatttctaaaacttgatttgagatgctgttatataatgattacaaattgtactattgatatttacaaataatcattaatttactctgaatagtcttaaaaactagaaaatatcaatctaaatgacaaattttcatcattttggtcattaaaatatacagtaagagattccttgatgaaacccaccatagacaagggagaggacaaggacaggctttgctctcggctaagcaaatgggaacatggaatttttcccactgatggtaagacagagccagcagaagaggccagaagagatgaggtccacagtgcaaaaacatgggcttgagaatgacatcagcgactggctccagacttcaaatacaggcaggggaagaaaaaaacaggcttttggctaacagttcagcatctatcccagcaagaacacacacacaaaaaaaattcttctaaaagagtaatacaaaatagataggatcagagaagacagagggtggaatgagttcgaacatgaggaattcaccagtggcctgctgaggaccatgtggattttaatgccacttcaggaaaataaaaatgaaatgtcccaccatcttaaaggtttgggacttctaatagaataagcatttgattaatgaaaaaacatgtactataaggaacaagggatcataaaaggctggtttttaacagcctaagtactttttgcatcttgaagtcttttatcaccttgtaaatcacccctggagagaaataaccgcagtgacaaggcagacttccattaccagcctgtccaccttggctctagattctcaagtatattgtcctggctagcaccctgtggtgtcgtgcctttattatggggaaagaagggctggggcattgtagtggacctagttttagtaaatgtctctggacaaatacgccccctccaaaggcattttcctttccttcactgtctctgttctgttctgcagtccagcatgcctctgtgggtggaatttaacagccagggtgtcagcctgctagggctccgcatcttgtgacttacaataacaaacgttctgttctcccaggttgctgtgcgggctgcctgtggttgagttaggactcttccatgtgcctttcatatccagacccagattggagagcaggcccaggggcatgttcctctcatggcatggaaggcaagctgcacctgatgagctctttgggagccactggttggacacggtgtactggaagtctgctcatgtgtcattgcccaaagcaagtcagaaggctaagctcagagtcagtgagggaggaggtgcgttcacccataggtaatctgagtcaggatgaggaaggcaggatgaattggagtcagccattccattgaccacaccgaagattatgcttgtaactacagagcctgaatacctcattgacaatctctcaggtcaaagtgagctgttctactcctggaagacatgtactcacatgtggtaagttttactaaaatgtcaggaaagaaccccaactttaaaaatttgaatcatttagatttatagccttcacctcaagcaaattcttggtgaaatagctcttgactcttgaggtatagtaaaggaactgtgctcagaagcttctgcacatggtctcatgtagttcccacaacagctgtgaaaggtggtcgttaccccattttccatatgaaggaactaaagtttagagaccacgttgtataaaggccatcaagctagggagttggaactgggatttgaacccaggtctgcctgactctaaatgactatgctgtgttagaggaatgtctcagggcttagcattagtgagaaactgaaacccaacatcggcttgtacatttcaatcccatgttcacatcctttcatcaccagtgccacttcagagactgatcttaggggaaatctctttgatatttacaaaagcgtattcatgtaagggtgctcatggtggtgctatttgtaatggagaaaaatttgaaattatataaaagattaaacctaaggatgcaataagtaatttgatatatctgttaggcaactttagacttgttatttatacaaatatttgatgtcattggaagtgatcacagtacaaaggagagactctaaagcagtgtgcacagtatgacctcacactggtagaaagaatactccaatattaatagagaacaattctgtataatatgcttttaggtaacccactcccatgcataccaaaagtttatcaagttacatatatatgtaaaatattgtacagaaataatatatatttgttaatatatacgtgtgtaatgtatttatgtaaatatatatatatttatttatttatttataagtacaggctaagactttgccctctcaccaacccacacacccccaaaaccagcctttcagccaaactcaagctgataaaaatttcattgatctgagcccttgcggcaaactaacctttagcaaaaatgccttctctaggctccaatttgagatccagggaaaacaggtttggaagagttaacgatcttggggaaattaccattgctgtagaatgaagattattacttgttctttcttcataggctagacacactattttttaaagctagttgtttatactgtttataaagaaataaatattcctcataggaaatttagaaaacaaaagtttttaatgataaaaagaatatatgatctcatcccatctcttagacaataacactttttaatcttttttaagacaagatgtagctctgttgcccaggctagagtgcactggcattatcatagctcactgtaacctccaacttttgggctcaagcaatcctccctcctcagcctcccaagtcactaggactgcaggtgcacaccactgtaccaggctaaattttttattttttatttcttgtagagacgagggcttactattactatgttgcccaggctggtcttgaactcctgcataagggattcttccacctcagcctcacaaattgctggggttacaggcatgagccactgtgacctgcctctaacatctgaattgacatcctgcatgtagagatatgcacatatagatgacagctgtacacccatgcatatctatatccatgcatgcatgcacatgctttatcaggccttccactccttaacagcctacagatagaaaacttagaggagcagcagggacgtactttcatgtactaagctacctagcatacaacttttaatggtttttgattttaaatggaaagaatctttcagcgggagacatcaaagggcctaagaaaaaaatggttttggtattaagtggctagtatgcttgtcaaaaaatgacaagaaataattaaaactaaactgaaacaaccaccacccctacaaaatccagaacaatgcacctcatttaaatgtttgtgaggaagtagaattgagtatctttctcacaagtaagttcttcttgaggcagaacagacaagaaacaagaactagaagtatttacaaatctatgtcagtggtagaaatttctccagcaggaaaacagagcctcaggctgtgtaatgaaagttgtactgtgagagctaacatttatttagtggatattatgtaaagtcagcattcccctatgcaaagcatattttggggccatgttgtaaacagcaatttctgcattgagttggccaaatgtgttcactaaggtgcccacaagcattggattgctccagatcgggtgtttcttctcctattgaaaggctgtttcctaccttaatgtcatctgttgagctctttctgttttataaacgtatggcttattggatgatcctaaagtcattgagcccttattattgtaattaagatggtaatattaagattatttttacctcaggactgaaattactttcaatgaacaatttaggtcactgttacatagacaagaatttaacttaaagagtgaataggtaataaatgatctctagaatgcttacaaatatctactaactttttaatacaatgctaaagccaaataacaaggcaaggtgcttctgtaagtgttctcgggaccaacccatttaccagtctgagtgcaggcaaccaccatctcatttaaatcacagaagtttagggaaaatcttatccagtattatggggctgtactagtaaactgcacacaaaggaggccacacgaatttgacaaagatttagagatgggattctgacagtcacgttttatattaaccagaaaaagagccaccaaattcaaccagagatgcaatttttttgttcttttcaacaaagttgaataaaagttgttgatcaaagagtgaagaaatttgaagatagaatttgccttaatttacagatgagccaccagaggctcagagggatgaagtgttttgttgaaattacacagtgggtgccattccaatgacttgtgactccacacattgccttctgatattcattaggaagtcatttgaaggaggaattctaaactttttggaaacatcactgctctctactcttcacccttattggaaatgcttttatttggagaaccttcaccaccttcatggaaaccaaaatgagggtcttcagagttcatgttccatgtagcattaaccctaccatgtgcttcccttgcacagggaactcctctgtaaggaaatggggaaaaagaaaagtattaagaaacaatcattattctcaagggaaaatgagaggctctgtttctcttgcctgaagtaaaatcggtgttattagtagctgcattcacagtgtgaagaatcacacagaaagccagtcattttgtttgctgatggagaattcatgtggtcctgcttctgactgatcgtgtcacagataatcaatgtgctgtatctccagccacctcactctctgaacttaaggaaaatgaaagtcatggtttcagaccacttcagtttcttttcatttttcctgtctttgacaatgaaaaagtgggcaactttataaaaaatgtcctaagtgagtagttgaaatcactgattatttttcaggtatctagtttcattctctcagtaaagaacacatgagtgataggaatgtgactcatatataattccctcttttttctgttatgtaaacattccaaaaagagaaacattaaaaattgaacccagggaagatgcatctatcattatgaatcatgatttcgtggcagtcactgcaggagagaacctgtctctcttatcctgatggtacttgcgataaaatacaagaatatgtggcaccactgtccttgataaattgagcactagaaaagccatgaatgtgaaattatctagcacatgataaatctgctgtaataaataaaaaacgaatagtcagaagaagtaggaactgcgtgaagtaaactttgcttcaaatgctgcctatctaactttgggcaggaatcctggctctctgaagactgtagaattgggctctttaggtcatgattaccaccacagaagcccttgcctaaaaagaaaacgttatggagtcacaagtttcaccttaaaaatgtgccaaagggatgtgtcaggatgaatgtggagttggttgaaaattcgttattaccttctcattgtcaggagtggcatgatcttccagttgacatcctgggaggctgttaaacctaggcacaagatgaatcttttaaacgtgctctcaatttgcctctgcaaaacctactttggtcttcaggcagaaatgaatgtcatattttaaagtatgtcgaaaatttctagaaagcatcatcagaaagccctaatgctccccttcatcattaagcttatcaacaaagatctagtaaacaccccaaaactagcaggtctctaaatgctgttatggcaacaaatggaaaatttaaatttatttaaaataattataataattctcagataaaccacaggattcagaagtctgttcataatattttccagttgttgagaatgtaaccctcttgtagattgagtaagagttaaattaagtgatagcccatcctgttctaacaggacctccagcgcctccataggccataactgggcagatcaatactgaggtgcttcccgctcagcttgggcttttcaaaggttgagctggcaggaatggctaagccctcagggaaggcacaccagacacaggaatggggtgtggaaggtcagcaaagaagaaggagaaataaaatgattctctgatattaaaggtaagctgcttatatttgtttaaaatcttgactgggcacagttcctcacacctataatcccagcactttgggagggtgacacaggcagatcacctgaggtcaggagtttgagaccagcctggccaacatggcaaaaccccgtctctactaaaaatacaaaaattagccaggcacggtggcgggcacctgtaatcccagctacttgggaggctgaggcaggataatcgcttgaacccaggaggccgaggttgcagtgagccgagattgtgccactgcactccagcctgggagacagagccagactctgtctcaaacaaaaacaaaaacaaaaacaagaaaatctttctctccatcatgttattcaatatgtttttaaaagcaccatttcttatagcctgatacatttcaaatggcccccctcccccagggatctctgttgctctctcctcattttccattggctttggtgtttgtgataaaccacagcagaagtgagtacatggaatcatttatttgtagcccttctgctcccccctaatccaagcctgctgaatccaagcctgtggaccattctgtggtccttgcttcagtggcaagatacaacagtgtggaaaatctagaaaagtctggcttccttgagtttattataaacatcaatgctgttagggaatcagaagaggactccaggaagcaaagagaagaaaagggttccttctctcccgtttccaagactggaagagcccctctgtgtggagcagggcacgctagtgttaggtaggggttcctagagaggaaaggcctgctttttgtctatcagccacagctctgggttgtctgcaaatcctgagaaagctttgtgagatctgagagcagagatgacctctgtctggaaagagtggtgaggaggtggagggagagggctgcagagagcctgggcataaatgccatagaaacagtcatgaagtctcccataatgttgggtggcacagaaatgtaaggccagatcctgtgtctccatctatggtatagaagcagtcaagatatccaccaaccagaaagagaacacatgtacagaagtgtgtgaccataggtggcatgtgtgtgtgtgtggatgagggaacaccccaagaggatggcagcatctcattggatgctgaagtgaacagatgacatctaggaccaggtgctcccccaaaccatggtgccctggaacttagatacaacttctagaaaggtagggaggaaatactgacattgatttttctttattccaatagaatcacaagctaactatttaaaaaaaataagaaacacaacttattcacattaatttctggactgaggcttatatccacaaatgcattttaactttaaagagcttaatgaagagcttactttcttagggtctagtgacgtacatatctgattgctcatgtgggaggctgcatggtgcattggaaagacgttaagtcagagaagcacaagaagacattgagttctgttctgctacttatcttctcttagtctcaggtttttccttttttttttttttttttttttttgagatggagtcttgctctttcactgggctggagtgctgtgacgtgatctcggctcactgcaacatctgcctcccgggttcaaaagattctcctgcctcagcctcctgagtagctgggatgcccagctaatttttgtgtttttaggaaagatggggtttcaccacattggtcaggctggtctcgaactcctgacctcatgatccgccctccttgcctcccaaagtgctgggattacaggtgtgagccactgtgtcctgccatggtctcaggtttttcacatgcaaatgaacagtttggacctgataatctctgaggacccttccagctctgacaatgtgattccttgagctgaattgttggtagtgttaccaacagatgagatgagatgttggatacaaagcacatagctcgaagcttggcacttatgtggtcaaaaaaatactaattcctgatatcctcccagtggtattatctagtgagccttctttcaaattcaaaggttttatttctcagatataatttacgtgaaaggctgtgattttctcctttctctgagttccaagtgcaggttttgttctgaagaagtcacacaatggactgatttgtcagtgtatttgtttccaaggatttcccttctacagttcttttcataaaagtggcactggttgacctgaattcatgaccaggctgagacagggctttctgcaaccctgttgaggccaatctcgctgtctgcttctattgcattcttcaataggacacttagtccattgggccagtgcaccatgccaaaaggagttactaaattgttaaagggggcctcagcgagttcacgtagatagagggaaatgccaggtcatcccagaggctgagggtctatcgaagttagtgcttgaaggtgctgttgcattggcagtgcatcacatgatacagggttttcacgtctgctttgaatacaactgtttcctgcagggctgctagtgtccgagccttgtctttttctgttagaaaccttcaacaaactactctctaaggggacagcgtttctaataggggatacttttgacagagctggctgaagaaagcaaatcgtgtgatggctgagagaggatcctatcaccctttattgcaccatgctctttatctcttcatttacaaccaccttctcattggcctcttcatcactgtattttgaacacataactagtcttttacccacatacagcgtcctgcacctgctggggctgagctgcagtatgtaggggctcacaacgatggtgttttgctttgcttttcagactcaaaatacctcagccaggagccgcagctggtttctttcaaagtggtttgcagatcccctgcatcctaatatgcctggggtgcccagtgaatgcaggttttgaagatcccattccagatcccctgattctccagatcccctgattcagaatctctgcactttcacctaacaccttgatgctggagacaccactcacacattcccttctacacctctgtctcactgctaggagccacctcagctaactcatgcatctctttgtagatggctcttttagttgttttctttgccagcagaagctgggatagattttctgagaagttcacacgtcttatttcagtaggctcatacctctagcacactgtggttttaccataagcacttagacaatggccacggatttaacataaccgagcgtgcagttctagttctcatcatacatacgcttccaccaaagttgtaatctgtgtaaccatagcgtttcttgtgctttttcacctgttactttctattacttaacagcccaatgtgaggaaatgattgtcaatgagtgctgggagtaccacactgttgtactttttgacagagtaggcggctctggaacctgtatcggtctggctgcctggtgcatttgctggccgagcatttctgtttttgttttctttttttctttcttttttgtttctgagatggagtctcactctgtggcccaggctggagtgcagtggcatgatctcagctcactgcaacctctgcctcccgggttcaacttttgtatgtttagtagagatggagtttgaccatattggccaggctggtcttgaactcctgacctcaaatgatccacatgcctcgacgtcccaaagtgctgggattacaggcatgagccaccacacctggccctggccaggcatttcttactgatgatctgagttgttccatcttactctgttccctcttagtatttcctagttactaacatgccctgaggctgcatttggatcaatttaataccactgttgtttccagttgtcacctcccaccatatggcagttactccagtctcctgctcttgcttatccttgaaatgcatcccagccagttaggcatctctgcttctgagacaggaggctgagaattccaccatgttcaaggaaatggcccttaggcactgtctaaggggaccatataggcagtctgataaagtcacatctaagaaaaacatttcagaaagcgtcagctagcacacctttgattatagaggaagccaattatgctcaaacactaatgaattcatttttaaggatgttatgatgcagttatgcatgtgcttctttcccaatgcattaagtaaagggaaacagctgtgactgagatgatctttgtaaatttgaagagctagtgatcataaatgatattttgagataactaaaaattatattaatgtgaaaatatctgtaatttgtattggaacaatatcacatgtacggttagtagtattgtgggttatgacttacattcataattggaggaagtgctatacattttagttaaagattataggaaataaagattcattctttcattaagttcacggtcccctcaactgatttctaagaacccctgatctagctcagtctcccagttctacctgggaacaaagactctgagatataaactggatgccaggatcacactcctgtttgccaggtaggattgactctcggatcccttcacccatgcttctttctgctgtgctcccctgctcctgctgctgaatcatgagatggactttagtggtgattgtgcttcgtgatcctattatagttccgatgtttttgtgttacatttgatcccagcaattctatacaattccttttctctgacgtgctttcattctgattgaaggtcagtgctgggtgcatgccatactccatttctcctggaatatgatggcaagttccctaataatttttttcattcttattgatcaaagtaccatgctcctacttatttagagggaaataaaaaaaaatgatagcaggaagcgtgtttttcttttgggtagtgtggatctgaagattgtattacaaaatttgatcaatatatgaaatatagagaaaaaccagaagcgatcaaccaaattaacagagccttctgaggcaagagtcactgggagactatggaagagctagaatacacttcgcagaatggatttcagtctctcagaggctccaattaggaaaagtatttcctgaagcagactggattctgtgggatcaaccacattttatagcactccaattgtttgcatttggaattctcccaaacatttcaccatttttggaatatttttagattggagtcaaagatactatattaatcttcagatcttgtgttgttacttaatttttcttatatgtaattttatctccttaactaggctacctgcattttgagattaggaaactaataagaagtgttgcatttctctgcatctttcacagcctttataatggtgtttggctgcaagtttacgtacacagtgcactgcggaaagagcctttgctttccacccacacacacaaggagcaaatcccatcttcacttcctatttcttgccaggtattaatccagctagctatgccccagtttccttactaagtaatacctacttatgcaggtgctttagtagaatgatacagagcagaaggtggttaagacaatacatggctcacagcaggggtttgaagagacaactattattaattaggtttccataaatatgtgtgatttggtgctcttactagctagtgtccagggggcctctcttgtacatttttttgtagtagtcttagaaaattggagctaaataaggtgaaagcctgcagagaggtgcagcacggagcattcccatacattttagcgactgtttattgtggatgtgtcatgtctatttgcctccttcctctttcaaagaattgatgccatccagcattggcgtgttttctcttcagttcttagagccctgcttactaagtcagtgaaattgtttatattgctttcaaagggccaagaagtgaaaccatttgaaaagagataggattatgttggggttttagaaagctgacatgtaacactaattttttccatctcgcattcacaatatattgagagagtacccagaagacagataaatggagatcaaaattttaaaatatttgttatgtattttgaaaattctaatcatgccaaagaagatgactttagctctatggtctaatacttcccctaggtctatgctaaggcttctcaaagcaaagaagagcaaagcaaaacaaaacaaaggaaaacagaacaaaattggaggttgtccccccgcacatgcagacagagcttgccctgaaaagccatcctcacagtggataaaaaagcatcctctctccaggctcacacattgaagagaactctctccaggctcacacattgaagagaactctctccaggctcacacattgaagagaactctctccaggctcacacatttgaaaagagagaggggatggcattctgctaatcatgttgtttcttctcccacactcaatagtaagatcagtctctcttcccagaagaaggaattttaaaaagaggcagagaagtgctaagcatcttctagctgagtggtcctcgatgtgtggtcccaggccagcagcatcacctcagctggggattcatctgtggcctcatcctggatctgtgactgctatgatggtccagagtccagggatctgagttccaccaagccttctgggcattctccctcagtggcccttaacccagggtccagggatctgagttccgccaagccttctgggcattctcgctctgtggtccttaacccagggcccaaggatctgagttccgccaagccttctgggcattctcgctctgtggtccttaaccctggttgcacatcagcatttcttaagaagattttaaaattatccatgttcgagacccacaggcagaaataatttataaattgaaattccttaggctaagggcaagggattcacacattttgcaagtgctttggataattctcaggtgcaggcagcgcccagggctacagcatggtccagcccagtccatggaaacaggagtcctgggcacagtgcaatgggcagacgctggcggtgacttcaaactcacagtcctgcctctggggtgtgtcctttcctcctgcctcagcacctggccttgagaacattatgaagtcacctgagacacaattagatctggtgacaatgaacagtgtgagatggtgagtttttgaggcacagaaagctcaaataccactgacacctctaaacttgtcagttaaaatgtggactgcattgtttcaagccgtcacaaaatccaaagtaggcagacattacctaatgtattttgaagagataatttcacatccttgaaaggaatccagactgaagactgccttcgttggcacctgagatgacccctcagagagccagtgaaaatgtagaaaagacacagaagccttaaagtttttacataagttatacttaaaaaaaaaaaagatggaaagataagctgtgtagccaaagagaagaatgttctttagaaagagtgaattacaaaagggacatgaacgcatggggtattaaagtaagtgctgacaatattctgatgacgggaaaattgagactaagattagtgatatggtttggctctgtgtccccatccaaatctcatcttgaattgtagttcccacaatccccaggtgttgtggaagtgacctggttggaggtaattgaatcatgggcgttgttacccccatgctactcttcttgtgacagtgagtacgttttcatgagatctgatggttttgtaaggggcttttccccttttgctcagcacttccccttcctgccaccatgtgaagaaggaagtgtttgcttccccttttgtcatgatagtaagtttccagaatcctccccagtcctgaggaactatgagtctattaaatctctttactttctaaattaccctgtctctagtacatgtttattagcagcatgagaatggactaatacaactagtcttgactttcttggggccctgaatgaaaagcagctttgtatttgtgcttcctcataaagtgcccattgactgtaaagaaaagcatcatgggccacatgaaaaactgcttaatttttcagacatgggcaaaccttttcgtttgctccaattttcagaagagtaggacactaaaacatgatgaatacaacatctagacttaattctatattatgtgaaaagtagtaaaaagaatgaaggatagaaaaaaagaagtgctaagggccaaagaaatggaagaaaagagaaaaggagagagaaaaaagaatagagcatgataacagatcaatagagaaaaacacaaagacagaagaagagaaaaaggaaggtacaagacagatgtgggaattggtataagaagatgatgagtagtcaatatgaggtgttaggaaatggcctcttgggttgacttggtccctggccttcagtccattacaaatcctcccaacagacattgaaatgaataactctttggcttgtattcagagatatttcactcttcttcatttttagctttcagagatgctgcactgaaagggatgtcataataaccccacagagtataaattactccatgaactgcagtgtcagtgatgagagcaatattaatttcaggtccaaatgaaatcaaacaaagggttaggtctacctatgtactgaaagtttccttgtctgactccaagactctggtgttgaaattcattgatcatttggaaaagaggccttctgcaaattcaatacacatctgaaaagcaaaaatgacatggtattcctgcagactgctgccagtaaaatgctgagtgaacactgataaaattaatgtgccttcaaacttgcacagtgcacctctcactgtcttggggatcagcccaaaataggggttattttagcagcatgtctgctggttgtggaacttgagtcatggctccttgctaagcccctgccactggagattattccagcagcatgctttggagtggcaggtggaatccaacccattcatcatgcagctaggcccaattttcttttctgatttccttggccgactttggggattccttaaggaaactgtgtggcacttgctatacttgggagattattagaggccgattatcaatctaggtatctcagagaaatctgatttatgtacttgaaattttctatttcctggatttggtgaaataagatcaaagtgacaagtcagtcgggagataacttttaaatcagtggtaatttttagtgttcctgtgtttactttatgacattaggtaaataaattctaaacatccttagtttaccatttgaatcccctgtcgtatactgtgcttccagtaatcacagggtcatgtactggccttggggttgcctacataaataacagagcctgggcaacctgttcacaggtgtagttctcgggagcaacacagccgtgatttttaaccagagatgtctgtgttcaaagctggtactttaaaacaatttaccagctgggcatggtggctcactcctgtaatcccagcactttgggaggccgatgcaggtggatcgcaaggtcaagagatcaagaccatcctggccaacatggtaaaaccccgtctctactaaaaatacaaaaattagctgggcatggtggtgttcacctgtagtcccagctacttgggaggttgaggcaggagaatcgcttgaaccaggaaggtggaggttgcagtgagctgagatcatgccgctacactccagcctggtggcagagcgagactccatctcaaaaaacaaaaaaagaaaaaaaaagcactttatcattctgtctctttatatacacattatatactctggaagtagaatctagagtccataaaaaagattacaaataataaataaaatatttagaataacgactaacacacagtggccattcagtatgtaatagttttccttataataattgttatatcatatttttcacaatatagattgggaaaaagcttctgagtgactaagtatatcacacaaaatctatggtacaatttatggggctattttaacttattcgcatttcgaatacatgttcttatctggtttctagggccacttattagaagcagcaaattaggacagaaaagagggactgttacagaaaaggagagtggtaagtgtgagaaatggtggctaaaggctattagtggttttgtgaaaactacaaaattataacattgggaacataaactgaaacattaagaaaaacagcccactggaaccacttcgtttaggagtaagataaacactagttcaataatccctgaggacaattcagtcctaaccgtgttcctggatccaccatctgcaacatttcttgtggtgtgttctgctggtaacgaattatttcttcatttatatgtctggaaaactcgattttaccttgatctttgaaagatattttctctggtagagaattttaggttgacttttttcctttcaatcctggagagattttgctcctctgtctcttcccttcccttgtttgagatgagagatagacggccattcttatcttcattcctctgtgtagaatctgactaggcaggtgctgtggctcacacctgtaatcccaatactttgggaggctgaggagggcagatcacaaggtcaggagctcaagactagcctgtccaacatgatgaaaccccgtctctactaaaaatacaaaaaaaaaaaaatcagctgggcgtggtggcgggtgcctgtagtgctagctacttgggaggctgaggcaggagaattgcttcaacctgggaggcagaggttgcggtgagaggagattgcaccactgcactcccatcttggcgacagagcaagactcctggaaaaaaaaaataaaaaaaaaaaaaatatatatatatatatatatacatatatacatgacttcccctctcccacatctcctggctttcagcgtcttctttttatttctggtttgagcaatttggttttcacatgtcttggtgtcgttttcttcttggttcttgtgcttggggctaaacttctgggatctgtgggtttaatacttctgctttttccatctttgaggattttaattccatgtatattggactactgggagtagtctcacattctgtgattagccccactaatgctctcagtttttttaactattattttttctatgttacattatggagtttttattgccacactttcaaatttacaatttttttcctgcaatgtctaatctgctgtaatttccactttgtgtattttttgacctcaggaaactgtagttttcttccctaaaagttcagtttgggcctttttaatctctcatgcctctacttaaccttttgaagatgtgggatatagcaataattgctttgtaaatgttcgtttttgaccattctggcatctgtgtcagctctgctgttggcttgcactgtgtggcccctgcagacttcaggctggtttcctttgtgccctttctcacaaagctcatgcatggatttccagcaggtgtgtgagtaaaacccaaatcagaggtaattctgattagctctggaatcctgttaatggataaacctgtgtccgtatcaaatggagggagagaaaattatttgtgccttcagggtcatctcctggtgttactgaaaaatacttccagagagtctatgggccactgtgaaccgctgtagctacgtccacccaactccaccatcatcaactagatagtgaatcattctgttcttttccatgatacaaaatgcctgatatgacctgagttttagacatcgtcccaacctccacgcatttagaataataggtacaatatgtctgttagtgcatgaataaagtcatataaaattgtgactttgcattcaggaagagtattcatggcgaatatttagtgcatgccatctgatacagagacactaagttcctccaatatgtttgcaatgctttgggggcaaggattatatctttattcccttctttagttcagtggttggcaataacataggtacaaagcaaaaatgcgttagtgcattatggccacaccgagcagcgtattcacactggtaatgtttattgaaagaaacattaaatatcacacctcgatattatcaaggaaactaactggatacactgtttacaaggctcgatgaaaatgtgaggtaccttgttcaaaaattattaagaattctaagactttgaagtagagcataaaaccaagtgcctgtctctgcagccacactgatcgtgtagccgtggagctggccttgcccagaaataatagtttacaacaagctactgtacagttcagaatagttagaagataatcattcaggtgtttctagcataagaaacagacaaatatttaaggtgttggatactcaattacattagtttcatttttacaaattatatgaatgcattaaattatcacatgtactaccaaaatatgtacatccattatgtatcagtagaaaattaaaatttttattaatggagaaaaaaatgaagtccctgattaaaagtgctagaaatgagaatttagaccttaaaaacagctaaaaatttaaaaggaaagttttggcaacaagccaacctcagaaagtatgagacccaaattcaaagaatgaactatgcaaatttctggctcacagcaaaattgcacatgtgcaagggagatctatgaagcctagtgaaaaagcagaaagaaaaaataattaaaaactgtagaaagtaaaacccaatttcaagtacaaaaaacaaaacaaaacaaaacaatacctcacagatttctaagttgctgaagacaacgtaatatttcctcccaagaccaagaagaagttgatttgaaaagagcaattactatacagactagtgttatataccattggtctagttagatttgctgcgcttaatgttactattacgtaaagttagtagttagggtctcggacttttaaaataaaaaaaatgtaggtactatgatggcaaatattggggttcatattgcagaacagttgaagtcatatttcactgttgattgaatatgccatggatatgtgagcatcttgagttggttgcacgacttttatacttccattctgaatgcaaaaaattaaagctttatgcttaaattaaataatgtggctaagattgttaacacgagcatatgaaactcagctccttgaaatagcccacctaaaaagatgcttgctttgggggagctgaataattttctggggacacatcttttctttgtttgatttgtttggttcaaaaaaaaagcattcatattatggcttgatatgccataaaattttgatttaaaatctcgaaaagccagagaaagactatctacaaaactgtcaagatgcattttggattgtctccctacttccattttcttcaaaagatttaaatgcaatttggattataaaaatcacattaagatagaaagactgtgggatgcatttcacctggggtgcttgttaaaaaacgcaatttctgggatttcattccagatctactcaatgagactctgcaggtgtgcccctagaatctgcattttttatgctttccagatgtttcttatgcacagtcaagtttgcaaaccactgctctcgagttttaattgacattaagtagaacttttaatggatgcacccctaatttctgaattattaatgattaatagaatctgcttttactatacactcactaaaatacatagctgcttgggctgaaatatacagatgtgttgccttgctgaaaagggaaggaaaatcaaagctcagactgagtcatgtttgaagtttagccatgaaatttgatggcttttagctgaattaaatggcaggcaaaatgtgtgtctgttctccacctctctcctctaacagcgtttccctgtcttgagctaatccttatgcagggatgtcttatcactgctcactgaatatctatagaaagacacgagttacaaagtcaagagctgcagacgtctctaggtttctcctcggaacagtcagtgacacagagctgtgtcaggcagagcctgctgctgatttaatttgatctttctagggaggattaagaatattgtcctcaacccagttagaatgttgctgctaagtttcaatgtgtcagaggctttttcattttcccagagccagtgctggctggcgtggcgagtgacaacattgcagcatttgcaaagtgactacgtcgtagcatttgcattatcttccttggtgtgcatatctttcaaccatgtcagggaagcggttggaaggaaaaatcacagagcacataagaaggacttctgggcctgctccggaggcttgcagaggacatgcccgaaggggtgcatgaagccttctgtcccatacctgtcccttgcctcgatgggattctgtacaccacaggtttctgtcaccactttgccttgaaattggaggcctcagttatgaattttataacaacatcctcaaataaggcctcactttgcagtgggtgcctaacttaaggatgatttttaaatgactgtgtcatgtttgtaaagacactttgtacttatcgaagtgcttgcatatataccatctcatttaatgcttgccaagattctgttaggtatgcgaggcaggtactgttatcttcactttatgaatgaggaaaaggcacacagaagctaataacaagtgaagtcaacactgggtctgaaatttgtaaactctgatataaaaaagaaatcgtatctctggaaagaaaactgttgcaatctatacacctgctttccaaaacatgtgtggctcttcagtagctattttgctgccttctacctactccggtgtgctgttggctatgtccagtgctgaggactggggaggaggcttttcttcccgctttaggatcatggtgatgtccttgctgacgactggggaggaggtttttcctcccactttaggatcatggtgatgtccttccagaatttgaactgtgctttggtcctgagcatgtcctggggtgcaacattcattgttctcatttgttagagaatacaagatcagaatttaaatagtcactgttttccaagatgcaaagtgatacgctcttggtgttttaaaatcctatctgttgatctgattggctggtattccagtcttccctgtttattgctctgtgactggtgggatttgccaataggtccaagtactttctctttccagaagcataccataatattggtgtaggatttgtggccggaacttactgggcatcaccccagttactgtcctaatacctcatattgtgtcagaagctgacaataggagttgaaaatgccataatatgaatctgttctcatagtgaaggtcgtaatgagaacgggaaaagctgcagaccgaaccagttctcattatgttctgaagccacatttcctccccacaacatgaattgtatggtccaggctctttaatcaagaaatgttccatttgaaagcattcctcatcccacagaaaacacaaatttcactttggagcacatatctagtaggagaatttgttttctcattcaattaaccagattgaaaatgtaagaacactattatggaagcttcaatgtcaatgtgtgtgtgtatgatgattgttgctaattaaaaataagctgatttaggacatttgaagcaaagaagcactcacattcccttatctcagcatttaaacagtgcctggactctgtgccctctgcccacattatctggctgtgcgtggcatagcttctggctgcaatagtgggaaagaatttagcagatgttcaaaaacaaatacattgttagcttatattgttgttgttgttaaggctgcttcacgtattttaaatttttcttttccttctgggagaggagttactactattaacaattctgcacattgcttgaggcaatgataaaccatattaccctatttattttactctcattgctatttgagaaaatggtgggccatatatgcttgtagattagctggtgtctttttgaagctactggcaaggctatgtttaaagtttcagttctaataaaaatgtgtttaaagcaaccaatggcaccgtacagggaatggcagaggaaaggtcattctgtgtgtcctgcagcctcagaagtgggatcttccccacacttttctgtgaagacaatgcaattcagagcagagacatcttcaaagctgctttgcacatgatggtaatgaaggattgcaatgtgagatcactgggattcccaataccacaaacactggtgttatgaaaggatgcttagtcccagcatgcctaagaaaaataaatctgattcctagtcttggaaatcccatctcatgcatgatgccatgtttccaaaactggaacatttctactgacttatttccatgacttcctttgctccagccactgaacactcactcccggtgtgtccttactaaaatgttagttaatgtgttatctgttcatgatagtgcagctgtctgcataacttctgtgtatttgtttatttatttaatttatttttttgagatggattcttgctctgttgtccaggctgaagtgaattggcgcgatctcggctcactgcaacctccacctcctgggttcaaacgattctcatgtcagcctcccgagtagctgggattacaggcacacaccaccatgcccagctattttttgtatttttagtagagacagggtttcaccgtgttggccaggctggtcttgagctcctgacctcaagtgatctgcctgcctctgcctcccaatgtgctgggattacatgggtgagctgccactcctggccaacttctgtgtatttattgagggaggtgatttgtgtggggatggtggaaggattggggcatgtgaaagagaaggagtcctggtttgtaagttagatcatgtgagggatagggatagggagtggagcacagagtgaatgagaccacacacgtgtaagagggaatgatgagcaggcaggaagagagggttggtgtaggaaagggttggtgcaggaaaggggtggtgtaggaaagggtggtataggaaaggggtggtgtaggaaagggtggtgtaggaaaggggtggtgtagggaaggggtggtgtaggaaaggggtggtgtaggaaagggatgttgtaggaaagggtgttgcaggaaagtgttggtgtaggcaagggttggtgtaggaaaggtgtggtgtagggaaggggtgatataggaaaactttggtgtaggaaaggcttggtgtaggaaaggcttggtgtaggaaagatttggtgtaggaaaggggtgttgtaggaaagggttgatgtaggaaagatttggtgtacgaaggggttggtgtaggaaaggggttgtgtaggaaagtgttggtgtaggaaaggggtggtgtagggtgctgacatttgcataaattgcactggggtaggagtggatgatgatggaaagttggaagaatgtgatattttggtggaaataataacttagaaactgagtcatcttttagctacagagaagggtattcccttcaccatatagtgagcggttgctgtatccatggctcttgacaaagatgttcactttgtgccttttcctgcattattggcatctggagttctaacaaccaagagagacagaggtcatagtggaatcaatatttctattacagataagaaaatcccagaaggagggcctacatagattaacctgtacacaaccaaactaagatttaagaatttttctgaagataatcctgggattatgtctcacatttcattttaagcttctttcttcatttccctttgctttatatttctctctcctattttattcctccttgaaataaaatgggacaataatgtgttttaaatgtagaatcaaggaataacaagaaatcatcatttcaactgctatcatgtccagtgaaattaaatgcttggataattactttgttaattactaacaactccaaaattctgattctcaatccacagtctattgaatcatataaatggcttgcttttattgaatggaaaaagacaaagaagaaaaagagtgtccagtagagaggaggagaaagcactacagggaacactagggtccccatgataagttcactttattccactccatagttcctgttaattaggagcttccaatcattgcagcaacatgggttcctacacttcaatccaacccctcctcttctactatccctaactttgactagtatgagatgaatacttgagctcagcaacttcccatggctttcgaatctcaggagttgttcttactctttttgatataacaaccctcaattaatgtttggtattcttatgcaaccagtgggaaaacaagtatgcatctggaaagcttagaaaatatagagatagtcatatacctaggcttgtttttattttaattgagtaatttgcaaaggtatcttctatattaataaatgcacattcaattcaaacagattgatattgaattaataggaagtaataaattggtttatttatgctagtggaattaaaaaatcttgctactctatacattcaatttctagtccctactttgaaaagagcattttcttccttttgaaatatatttgagcatagtaactttcaaggtcctaagtttattggcataatttaatggaaaaatttatgctctaaagcattcatttttttccccaagctttgtggttttcaatttctcatctactggatggcttttagtttacatggcagaacagaatcttctcaactttttgattcccctgataaaatattcaatagagaattaagtcaaaatttgcttcacccaaggacatgatctcatccttattcttgtcttcatgcctattgaaatacagctattcttatatgtatttagctaagtgataggcttaagcatcagttatcttttttggctaatttgtttcaaaagtaattgagcccatgtacacatgaaataatatgtaaaacagtaaagatccctgtacacaacagtattgaagccactgtaatatttcaagactaaattagacactctcttcctagccccctttcactcctccaccctccaccacataggacactttctggaaaagaagtccaggcaaagagacgttagtttaattgttgctaacgtcatataaaaatgatcaccaacttggaatttctgaattcacatgaaagggtgatactgagtttaaacgtaaagtttcatatcccattggtgtcaaaattggtggatagaaagagtacaggattgtaaagcaatttcagagcaagcttctaatggcaactttagtccacagtttggatcctgtgcccacctgacatctattctttttttgagttggagtcttgctctctctcccagtcttgagtgcagtggcgagatctgggctcactgcaagctccgcctcctgggttcacgccattctcctgcctcagcctccctagtagctgggactacaggcgcccaccaccaagccagctaattttttgtatttttagtagagacggggtttcacggtgttagccaggatggtctcgatctcatgacctcgtgatccacctgcctcggcctctgaaatctattcttagctgtaggtggggaccaggaccagaatcttcagagcaggccctagaaagctgggaagtcaggggattccactacaggtttctctattctgtcggcattttaagtggttctgtttagatctaggcacattagagctacccctcaaacagacgacgactcttaagagccccggaatttctttattacccagggagtcactggggactggcagtaggtgccaggtttggcgatggcgttttgtgaatcactgagctcatctcagggcagagcagcttcctaatgtgactgtcatctcctcttcctttccctccaacaccagccacacttcaccacactggccaggtgtttaccaacctaccccttcgtacaaagttcaacctgacattgtttggtagtcaatgatataaagcttgttgtctaagtcagcatctgcagttttaccgactgatagcaaggtacaagatagaatatgattcgggacaggagtcatcaacgtgttgcctttctgttgcatggaatgaacgttttgaagttggaagtgtcctgaaatttcaggacttcatcttaaagatgaaaaaaagatgaggtgtcatgcacagacagctattttgtggcagcatttgaattcaaccccaagtcaagttatgatatctcctgtgtcagaggaaagtacttttgataatcctagaaatatcaagactccagtggcagtgaatatttgatttccactttgaaatgtagatcacattagcaggatattccctaaaggagctttatacacagttggtcctccctctgtcaacctcatctccgactcaagtggatcgagttcaaaacagccacacttgttccagaagccaattttgtttgggccataatatagagatggtcccatccagcctttaagcatgctaagcacaggtagctgtttgttacaatagttgaaaggagaaagccataaaaacaaagtctcccactatttcatccaatttaaaattgcggaaggtgacagaaaatataactgaaagctttccctaacctctctttaaagaagtcctagaaaaaaaaaagaaagcatttatttccttgatgatttctaagtaataactaaatatggatgcaattttgaaccgtgtatggatgttcccagtataatgttcctcttttggagacatcgcatcatatttatttatctcactccctgtcctttcccccattaaagtggacctgtgcatagttgatgcttgtaccaagatacacaccttcttcctgtttccaggacggtacgatgggaggcaggagtgagtgtccggaaagagggaagaaaaaaaaaaacaaatctcatcattgcttatttgtctactgcttttggctctgctgagatgtgaagtcattctcatttcattgtgttcggaagtatagcctgcgacttgttgaaagcttagcgctagacctgcctctcagagacttgctccctctggaaatgcccagctgaggatgcgcgtggtgcgtgttgaagaacactgccttagaggtggacacttggggacaggtgcgctgcggccggactcgtggacagttgcgctgcggctggagctggccccgcatttcttcactttctgaatcgtaatgctctcagtgagttgcaatttcatattgctacatttgtttttactggtgttaaattcaggcagttaaatctttcaagggttactaaaaaatgcgaatatttgtgtatttacatgtctaaggagaagaccctttggcaatccaggaggagacaaggactcaggctttttcttccagttaactgtggaggacacgccattgctgctgtggctgctgaaggaggagaaatctccttgttctcccgtcttcctgctctccagtcccctgtctgggcttcccatttgctgaacacagccagatgccagccgagctcaggaagcgtagtttgcagggggtgtatccagagacacagctcggagcaagggaagcgagaggaagagatccaaccttaggacaaagggccaagaacttggagaggacttggcctaggagacaatctagggcaagcacgttatccagggtgactgggcaggcagagaaaccccaagaggcatagagctcatgtccgttcaaagtaggagagtctgggctctgctctcggagtcggagctgggggccttcagggtacttcctatggagacagcctagtttatcagaaaaaagggaactttcttttttaccatctagccttcaccttggcagggagacaggtgttttgagtagaaacacttcaactcgacatgtcaaaccagtgcttcagcagagctgtgcctggcccgcccacctctcccctgccctcggttttggtccagagtctattctgaatgtctgatgtctctcttggttagtgtgattgaaatacggcagaaagccgattgcatcgtgtggggaagttgaaatcaatgcaaccaacaattatattaacggtctagttaagaataaaaaagtaatagaacagacgtgccttggtgaacatttattttctatggagaaataaacatagttgctgcttttggactccaccctgggcaacaaggtaatgaatgtggagttaggtggtgactaaagaatttggattctttcctccaggttacaatgctcgttaaggggcagcctgtaatgaaacctgcgatatgtgctagaaccaactaaatgattattttaaaagtcacagtctgcatggggcttcataaattcacaccagggagagctgtctaatgggattgccaccttccacccccaacgcagacttcaaagctccttgctaggtctccactcaaaggcttatcccatggcccgagcaaggaaggcctttgtgtgtgaaaacacctgccacccagcttcaggagcactgagcgctttcggcatggccgtccccactggcccacatggcatttcttacagtgagcttggtttttgactgcattgttttgcttaacaagctgttttttttctacagatgtaaccttttcctgtgtttcctgactgggacatcagccaggtattctagccaactttggtagatatatatcattgtttttgtgccaggcttgttttaaaaaatctacctattgcttgccctgatcaatccatcactacccttgaaaaggtcatggttctctcatcaggaaacttttcaaaaatccttggctgtgatttatcttatgttatgggctctgacagtgattctcaggaagtgaggcccattagtttcttgtaaggtcactcccctgctgttgcatgcagagtgagtatcagttgtgcttgcctgagtttgaagcatcctcttgggtgatttcaaggggggcaaaggcagggccatgactggtttctgtgtggagactcacacgggtgagacaggtgatccatggtggagagggagggtgtctcttgtaggtgctagagcctcaaagatagctcttattttcaatcctgcttctccaagattcagttcacaaagataagcatgcctggaaatatttaatattttatcttattatattcatattctgtggttgtttaaaaattcttcagtatgttataaacaaatgtttctgattgcccataagcttcgtagggacattaattattactgacatgagaaattaaaggcagcctagatattatttttaggaattacagcatttgaaaatcatattcagtgaatttcagagaaattatatctatactatttaacaccgagtaatgtttagtgaaagggtcagacactttggggtaaaaagcggcattatgaagtcaaataatttgttttcatgtttaggaagacatttttagggatatagttttggttatatgaattctttgtgataagggcaaaatcagatattatacaggaagcatttatgatacccattcaattgtaagatctcactattttcccattcaataatctcagccacctaaaatacgtccagtgtatattttctgttctttctagatatatcgtcatttcaaatgctcatttcagccatgatcatttattccagaaacacttgttaggacattatacttatttcctttaagtataaggtcctgtgttgactactgagaatgaaaaactgaacaagacagaaagtcccaccttgaagagcttccaagtgtagcgagtctcctggcatcaggtatggctggtatcatggaaacactcggctgactgtccaggagatgctggttaagaggtggaaggtgatggcgtgaaatcaagttcaggttcaggggacactcctgagagcattcctgccctgtccccgtggcctgagcggccttctcagttgcacaggtaggttttctctgctctgcactccctctgtcccaaggtaccctttagcaaagtgtaaatttgtaagagtggttagccctggactttatctcaagtctgtaataagggcacctacactaagactgaaactggaacatgctattggtgatcaaaccatcagtgttaataagtcacttaagttacatttatggactggagaaagaaatggaagaaaatcagagtacaaataataaatggttaccaggtccctagatctgaaagggcgaatacattcatgcagtaggtgtccaggatactcatgtggtcctccttcatgcttaggaacacagacgctcatcttcactatgcaaaccagagcctgcgtgcctttcgtggtccttcatatttgcagtgtgtgggttggagttgctttcttagccatgacagtgactgaagggaatatcagagtctgttaatgaatgatgtttagagatttcattttcaaaatatatttttaaattacctaattatatgatattgtattggaaagttcttagattaggtttcactttagaaatgtgatttggccctaagagtgataggaaagaaatatgttcctaattattctcagataattaaaattcatcctgttctttatgcttgttgaattaaacataaagggaagacatcttattgtttaataattaaaataatttgaattagattttaaattggcctcaggaagatcaccttggttcatttactgataatacattccaaaactgatgattctaactacttacctttgaaggaaaaaatttggatttttttcctcatttcttctctccctcctccttgagagtaatgtggtgtggtggaagaaagatttgctgagtgtttggaagcttacgttttagcttggcctccaatatttcctcatagtaaatctctaaagccctttgaattctttgaattcaatttcctctgtggcaaaatggagctagtaatgcaacctcatgcaaacaacagagactcagatgagagaactgatatgaagacattaatacagctgcaaaacattatataaatgcaaggtattataattactagttctggttcaatacaaggcactccatgcatgtggaaaataactacctatggccaaaaggcgcatcatgagtgtctcctcctgccacggctccccaggtcttccgtcatcccatttcattcctagaggcaaccactgttcctggtgagtgctaaggaccttctggaaatagcgacacagcaagagattttgctaagtatgtttaatagacatagggcccacttcccaggagaataccttttaattttagtaggacacagttttctcaagatttgctcaagatttaaggaatcgtacttgctcaagatttaaggaataccacttaggaatttttttggttaaaatagaaaagagtaggatctgtatgctgttagcttgctgaaccagccgtttctcagatgtggggtgaaattcatggagtaccaccgaaggggtggaaataacacaaggagcatgaggtatcagccacatagctgccttcactacccaaaaggtagcatttcttttcaaagctgtttctcccctttctcgtttgtagatcactgggtgacagctctgacagaaacgaatagcaggtgggatgacatgcgttcgtgggatttaggttatagtttggctgtaacatattgctgtgtctctttttccagacatgccttcatttcgtaggctcaacacctcttttcaacgtaatgattagattcaaggcctgcatttcagtcaagacgtagtcacgagtcactgtgttcttattgtcacagctggggcttcaagcccacatcagctcttccagaagatcaagggagtcaggccacccagaagcagaggagaggatgtccctcaagaatgagacaggaaatgcagaggaaatgggacaccacctgtcctggaagacaaggccagtcacagtctcgtagcactcattctaggcaatccacccacccatgagggaaaacgtggggaagaagaaagcttccctgcctgagacacgtatggaagccaagagctcctgggtcatgatacctgcccaattaagcagaaacaggtttggagacagaaacgatcatgacacggacctccaggaagtgtctccttgacggactgggaagtcatctttgttgaaggcattcggccagagcgaaacacatccaggcccctgagaaataggggaggcagagccagagggaggagagagcagaggccagagcacaggcaggatacagcactgtgccacggccacgggtgtaaggggtggggttccaaaagggtggcttgtccagagaggccagcgttccagtgacagggattgttgccatcttccattcccggtttcctcttgctgactgtatcgtggagtggcttcatttctcagagaagagccgtgaagagatacaagcgtcttctctagcgtggatccgctgctctcctgtgggacaaagagttcctctggggctcttgtcctccgctgcagtatgttcatcttgatcctagaaaagaggctgcacaggatggggatgagatttcacttgctccgggagcgacgcgtctcctcacgtgggccaggctttcacacacccaaagcggatccgccgcggcaaaaatgattgacagccggcttcatgacccaggcagagaagcagaaagaggctcgccaaagacaggccaccatgcgacaaaccactttgtgccgcacagggcacattcggccaaagacacacatgcacaccggcatacacacacaaatccatagagagagggaaagaaacacacagagactgagagatagagagagaagagagaatgggagacacacaaacagacacacacacacacgcagagtcatacaacagaggcattgaaacacacaccctctggcaacccctgaggctgcgggattctgctctggaggagaacgaccctcgggtgagagagcagcccaggggcacgcaggccgacccgtcctcgagatcacggacggcggcacgacttttggtgagactcaccccaaccaaaaccgtcggtgcaggcctgaggctgggatcccgtgctgcttcccccgtctccgcctggggtttcatcatcatggtcggccctttgcgactgctgtcatcaggagaggttcccttcgaccccgtggaaaggtgaggccggagcctcagagcctggatgcccaagcagtgccaaggagggctcctgctctgccaagcctcgggaactggtgtctaagacaaccgtgggaaccactgtgacgggagaaaccgctcgcgcctagcgcatgcgcattggctgagccgactcacgctccactcctgacagataggctgcgtcccctttaaatatcgccaccgccgcgcggcggccgcgatgctcctgctgccgccccggcagcgcctgtgtcctgggtcctgtttcaggcggcgtgggagagggggcgacgggtgtctggtcctgtcccaggcccaaacccccagggctcctgtcctcaggacctgcttgagccgacttccaccaagggagggggagcttcaggacgcctgctgtgttctctggactcccgttgagatcccattctggccccctccgagtgacataggatgggctcaccacatgtggtcaggccggcagggcctcgctgcagcacacaatgaccccatagttctcaaggcctagtgtcagagcaaactcattcatccatcagccctctgcctccctcctcctttgaaagagcagtggcctgccccgcttgtaaaagccgaggggttccggaaagccgaccatgctttacaggacaactgcaaagaggaacagaggcgaaatccagggggagaccatgtgaccacgcgtggcactggccaatcccacagcagttggtgttaacgtgtgacaccggaggcaaacggggcgacggcgaaacgaagggtggggtccatgcacgtgccggtggaagggggaaacgggtgacctttccgtcaatgccaaggaaaatcaaacaacacctgggacccggagggtgtaggggacgtctgtgcctgacccaagccacgttttcaaatgcctaccagaggaacaaagaggtttctgccaatttcgcaacacccccaatcctccaccgaactcgtagccctgatgcaacttcggctggaacaaacccacaaagagtgggaaagaaacacacagagactgagagacagagggagaagagagaatgggagacaaacacacagacacacacacacacacgcagagtcatacagcagaggcattgaaacacacacccccaggcaacccctgaggctccggggttctgctctggaggagaacgaccctcgggtgagagagcagcccaggggcacgcaggccgacccgtcctcgagatcacggacagcggcaaggcttttggagagactcaccccaaccaacaccgtccgtgcaggcctgaggctgggatcccgtgctgcttcccccgtctccgactggggtttcatcatcatggtcggccctttgcgactgctgtcatcaggagaggttcccttcgaccccgtggagaggtgaggccggagtctcagagcctcgatacccaagcactgccacggagggctcctgctctgccaagcctcggggactggtgtctaagacaaccgtgggaaccactgtgacgcgagaaacagctgacggctcacgcatgcgcattggctgagccgactcacgctccactcctgacagataggctgcgtcccctttaaatatcgccaccgccgggcggcggccgcgatgctcctgctgccgccccggcgtcggctgtgtcctgggtcctgtttggggcggcgtgggagcgggggccgcgggtgtctcgtcgtgtcacaggcccaaacccccagggctcctgtcctcaggacctgcttgagccgattcccagcgagggagggggagtttcaggacgcctgctgtgtggctccggactcccgttgagatcccattctggccccctccgagtgacataggatgggctcaccacatctggtcaggccggcggggcctcgctgcagcacacaatgaccccataggtctcaaggcctagtgtcagagcaaattcaccgatccatcagccctctgcctccctcctcctttgaaagagcagtggcctgccccgcttgtaaaagcccaggggttccggaaagccgaacgcgctgtacaggacaactgcaaagaggaacagaggcgaaacccagggggagaccatgtgaccacgcgtggcactggccaatcccacagcagttggtgttaatgtgtgtcaccggaggcatacggggcgacggcaaaacgaagggtggggtccagggatatgccggtggaagggggaaacaggtgacattttcgtcaacgtcaaggaaaaacaaacaacacctgggaaccgtggggtaggggggcctcctgtgcctgacccaagccacgttttcaaatgcctcccagaggagcaaagaggtttctgccaatttcgcaacacccccaatcctccaccgacctggtagccctgacgcaacttcggctggtacaaacccacagagagtgggaaagaaacacacagagagtgagagacagagagagaagagagaatgggagacacacacacagacacacacgcacacacacgcagagtcatacagcagaggcattgaaacacacaacaccaggcaacccctgaggatccggggttctgctctggaggagaatgaccctcgggtgagagagcagccgaggggcacgcaggccgacccgtcctcgagatcacggacgccggcacgacttttggtgagactcaccccaaccaacaccgtccgtgcaggcctgaggctgggatcccgtgctgcttcccccgtctccgcctggggtatcatcatcatggtccgccctttgcgactgctgtcatcaggagaggttcccttcgaccccgtggaaaggtgaggccggagcctcagagcctggatacccaagcactgccacggagggctcctgctctgccaagcctcggggactagtgtctaagacaaccgtgggaatcactgtgacgggagaaaccgctggcgcctagcgcatgcgcattggctgagccgactcacgctccactcctgacagataggctgcgtcccctttaaatatcgccaccgccgcgcggcggccgcgatgctcctgctgccgccccggcagcgcctgtgtcttgggtcctgtttcaggcggcgtgggagagagggcgacgggtgtctggtcctgtcccaggcccaaacccccagggctcctgtcctcaggacctgcttgagctgacttccaccaagggagggggagcttcaggacgcctgctgtgttctctggactcccgttgagatcccattctggccccctccgagtgacataggatgggctcaccacacgtggtcaggccggcagggcctcgctgcagcacaaaatgatcccataggtctcaaggcctagtgtcagagcaaattcactcatccatcagccctctgcctccctcctcctttgaaagagcagtggcctaccccgcttgtaaaagcccaggggttccggaaagccgaccgtgcttaacaggacaactgcaaagaggaagagaggcgaaatccagggggagaccacgtgaccacgcgtggcactggccaatcccacagcagttggtgttaacgtgtgacaccggaggcaaacggggcgacggcgaaacgaagggtggggtccagggatatgccggtggaagggggaaacgggtgacatttccgtcaacgccaaggaaaaacaaacaacacctgggaaccgtggggtaggggggcctcctgtgcctgacccaagccacattttcaaatgcctaccagaggagcaaagaggtttctgccaatttcgcaacacccccaatcctccaccgacctggtagccctgacgcaacttcggctggtacaaacccacagagagtgggaaagaaacacacagagagtgagagacagagagagaagagagaatgggagacacacacacagacacacacgcacacacacgcagagtcatacagcagaggcattgaaacacacacccccaggcaacccctgaggatccggggttctgctctggaggagaacgaacctcgggtgagagagcagccgaggggaacgcaggccgacccgtcctcgagatcacggatggcggtaaggcttttggcgagactcaccccaaccaacaccgtccgtgcaggcctgaggctgggatcccgtgctgcttcccccgtctacacctggggtttcatcttcatagtcggccctttgcgactgctggcatcaggagagtttcccttcgagtccgtggagaggtgagaccggagcctcagagcctggatacccaagcactgccacggagggctcctgctctgccaagcctcggggactagtgtctaagacaaccgtgggaaccactgtgacgggagaaaccgctggcgcctagcgcatgcgcattggctgagccgactcacgctccactcctgacagataggctgcgtcccctttaaatatcgccactgccgcgcggcggccgcgatgctcctgctgccgccgaagcggcggctgtgtcctgggtcctgtttggggtggcatgggagaggggaccgcgggtgtctcgtcctgtcccaggcccaaacccccagggctcctgtcctcaggacctgcttgagccgacttccaccaagggagggagagcttcaggacgcctgctgtgttctctggactcccgttgagatcccattctggccccctccgagtgacataggatgggctcaccacatgtggtcaggccggcagggcctcgctgcagcacacaatgaccccataggtctcaaggcctagtgtcagagcaaattcactcatccatcagccctctgcctccctcctcctttgaaagtgcagtggcctgccccgcttgtaaaagcccagggtttccggaaagccgaacgcgctgtacaggacaactgcaaagaggaacagaggcgaaacccagggggagaccatgtgaccacgcgtggcactggccaatcccacagcagttggtgttaatgtgtgtcaccggaggcatacggggcgacggcaaaacgaagggtggggtccagggatatgccggtggaagggggaaacgggtgacatttccgtcaacgccaaggaaaaacaaacaacacctgggaaccgtggggtaggggggcctcctgtgcctgacccaagccacgttttcaaatgcctaccagaggagcaaagaggtttctgccaatttcgcaacacccccaatcctccaccgacctggtagccctgacgcaacttcggctggtacaaacccacagagagtgggaaagaaacacacagagagtgagagacagagagagaagagagaatgggagacacacacacagacacacacgcacacacacgcagagtcatacagcacaggcattgaaacacacacccccaggcaacccctgaggatccggggttctgctctggaggagaacgaacctcgggtgagagagcagccgaggggaacgcaggccgacccgtcctcgagatcacggacagcggcgcgacttttggcgagactcaccccaacaaacaccgtccgtgcaggcctgaggctgggatcccgtgctgcttccccggtctccacctggggtttcatcttcatagtcggccctttgcgactgctggcatcaggagagtttcccttcgagcccgtggagaggtgagaccggagcctcagagcctcgatacccaagcactgccacggagggctcctgctctgcaaagcctcggggactggtttctaagacaaccgtgggaaccactgtgactggagcaaccgctggggcctcgcgcatgcgcattggctgagccgactcacgctccactcctgacagataggctgcgtcccctttaaatatcgcgaccgccgcgcggcggccgcgatgctcctgctgccgccgcgaaggcggctgtgtcctgggtcctgtttggggtggcatgggagaggggaccgcgggtgtctcgtcctgtcccaggcccaaacccccagggctcctgtcctcaggacctgcttgagccgacttccaccaagggagggggagcttcaggacgcctgctgtgttctctggactcccgttgagatcccattctggccccctcggagtgacataggatgggctcaccacatgtggtcaggccggcagggcctcgctgcagcacacaatgaccccataggtctcaaggcctattgtcagagcaaattcactcatccatcagccctctgcctccctcctcctttgaaagtgcagtggcctgccccgcttgtaaaagcccaggggttccggaaagccgaacgcgctttaccggacaactgcaaagaggaacagaggcgaaacccagggggagaccatgtgaccacgcgtggcaccggctaatcccacagcagttggtgttaatgtgtgtcaccggaggcatacggggcgacggcgaaacgaagggtggggtccaggcatatgccggtggaagggggaaacgggtgacatttccgtcagtgccaaggaaaatcaaaccacacctgggaaccgggaggtgggggtgccgactgtgcctgacccaagccacgttttcaaatgcctaccagaggagcaaagaggtttctgccaatttcgcaacacccccaatcctccaccgacctggtagccctgacgcaacttcggctggtacaaacccacagagagtgggaaagaaacacacagagagtgagagacagagagagaagagagaatgggagacacacacacagacacacacgcacacacacgcagagtcatacagcagagacattgaaacacacacccccaggcaacccctgaggatccggggttctgctctggaggagaacgaccctcgggtgagagagcagccgaggggcacgcaggcctacccgtcctcgagggcacggacggcggcacgacttttggtgagactcaccccaaccaacaccgtccgtgcaggcctgaggctgggatcccgtgctgcttcccccgtctccgcctggggtttcatcatcatggtcggccctttgcgactgctgtcatcaggagaggttcacttctaccccgtggaaaggtgaggccggagcctcagagcctggatacccaaacactgccacggagggctcctgctctgccaagcctcggggactagtgtctaagacaaccgtgggaaccactgtgacgggagaaaccgctggcgcctagcgcatgcgcattggctgagccgactcacgctccactcctgacagataggctgcgtccctttaaatatcgccaccgccgcgcgcgccgcgatgctcctgctgccgtcccggcagcgcctgtgtcttgggtcctgtttcaggcggcgtgggagagggggccacgggtgtctggtcctgtccaggcccaaacccccagggctcctgtcctcaggacctgcttgagccgacttccaccaagggagggggagcttcaggacgcctgctgtgttctctggactcccgttgagatcccattctggccccctccgagtgacataggatgggctcaccacacgtggtcaggccggcagggcctcgctgcagcacaaaatgatcccataggtctcaaggcctagtgtcagagcaatttcactcatccatcagccctctgcctccctcctcctttgaaagagcagtggcctaccccgcttgtaaaagcccagggattccggaaagccgaccgtgcttaacaggacaactgcaaagaggaagagaggcgaaatccagggggagaccacgtgaccacgcgtggcactggccaatcccacagcagttggtgttaacgtgtgacaccggaggcaaacggggcgacggcgaaacgaagggtggggtccatgcacgtgccggtggaagggggaaacgggtgacctttccgtcaatgccaaggaaaatcaaacaacacctgggacccggagggtgtgggggacgtctgtgcctgacccaagccacgttttcaaatgcctaccagaggaacaaagatgtttctgccaatttcgcaacacccccaatcctccaccgacctcgtagccctgaagcaacttcggctggcacaaacccacaaagagtgggaaagaaacacacagagactgagagacagagggagaagagagaatgggagagaaacacacagacacacacacacacacgcagagtcatacagcacaggcattgaaacacacacccccaggcaacccctgaggctccggggttctgctctggaggagaacgaccctcgggtgagagagcagcccaggggcacgcaggccgacccgtcctcgagatcacggacagcggcgcgacttttggcgagactcaccccaacaaacaccgtccgtgcaggcctgaggctgggatcccgtgctgcttccccggtctccacctggggtttcatcttcatagtcggccctttgcgactgctggcatcaggagagtttcccttcgagcccgtggagaggtgagaccggagcctcagagcctcgatacccaagcactgccacggagggctcctgctctgcaaagcctcggggactggtttctaagacaaccgtgggaacccctgtgacccgagaaaccgctggggcctcgcgcatgcgcattggctgagccgactcacgctccactcctgacagataggctgcgtcccctttaaatatcgcgaccgccgcgcggcagccgcgatgctcctgctgccgccacgaaggcggctgtgtcctgggtcctgtttggggtggcatgggagaggggaccgcgggtgtctcgtcctgtcccaggcccaaacccccagggctcctgtcctcaggacctgcttgagtcgacttccaccaagggagggggagcttcaggacgcctgctgtgttctctggactcccgttgagatcccattctggccccatcggagtgacataggatgggctcaccacatgtggtcaggccggcagggcctcgctgcagcacacaatgaccccataggtctcaaggcctagtgtcagagcaaattcactcatccatcagccctctgcctccctcctcctttgaaagtgcagtggcctgccccgcttgtaaaagcccaggggttctggaaagccgaacgcgctttacaggacaactgcaaagaggaacagaggcgaaacccagggggagaccatgtgaccacgcgtggcactggccagtcccacagcagttggtgttaatgagtgtcaccggagggatatggggcgacggcgaaacgaagggtggggtccagacatatgccggtggaagggggaaacgggtgacatttccgtcaatgccaaaggaaaatcaaacaacacctgggaaccgtggggtaggggggcctcctgtgcctgacccaagccacgttttcaaatgcctaccagaggagcaaagaggtttctgccaatttcgcaacacccccaatcctccaccgacctggtagccctgacgcaacttcggctggtacaaacccacagagagtgggaaagaaacacacagagactgagagacagagagagaagagagaatgggagacacacacacagacacacacacacacacacacacacacacgcagagtcatacagcagaggcattgaaacacacaccccaggcagcccctgaggctccggggttctgctctggaggagaacgaccctcgggtgagagagcagccgaggggcacgcagcccgatacgtcctcgagatcacggacagcggcaaggcttttggcgagactaaccccaaccaacaccgtccgtgcaggcctgaggctgggatcccgtgctgcttcccccgtctccgcctggggtttcatcatcatggtcggccctttgcgactgctgtcatcaggagaggttcccttcgaccccgtggagaggtgaggccggagtctcagagcctcgatacccaagcactgccacggagggctcctgctctgccaagcctcggggactggtgtctaagacaacagtgggaaccactgtgacgggagaaaccgctggcacctcacgcatgcgctttgggtgagccgactcacgctccactaatgacagataggctgcatcccctttaaatatcgccaccgtcgcacggcggccgcgatgctcctgctgccgccccggcgtcggctgtgtcctgggtcctgtttggggcggcgtgggagcgggggccgcgggtgtctcgtcgtgtcacaggcccaaacccccagggctcctgtcctcaggacctgcttcagccgatttccagcgagggagggggagcttcaggacgcctgctgtgtgctccggactcccgttgagatcccattctggccccctccgagtgacataggatgggctcaccacatctggtcaggccggcagggcctcgctgcagcacacaatgaccccataggtctcaaggcctagtgtcagagcaaattcaccgatccatcagccctctgcctccctcctcctttgaaagagcagtggcctgccccgcttgtaaaagcccaggggttccggaaagccgaacgcgctttacaggacaactgcaaagaggaacagaggcgaaacccagggggagaccatgagaccacgcgtggcactggctaatcccacagcagttggtgttaatgtgtgtcaccggaggcatacggggcgacggcgaaacgaagggtggggtccaggcatgtgccggtggaagggggaaacgggtgacatttccgtcagtgccaaggaaaatcaaaccacacctgggaaccgggaggtgggggtgccgactgtgcctgacccaagccacgttttcaaatgcctaccagaggagcaaagaggtttctgccaatttcgcaacacccccaatcctccaccgacctggtagccctgacgcaacttcggctggtacaaacccacagagattgggaaagaaacacacagagagtgagagacagagagagaagagagaatgggagacacacacacacacacacacgcacacacacgcagagtcatacagcagagacattgaaacacacacccccaggcaacccctgaggatccggggttctgctctggaggagaacgaccctcgggtgagagagcagccgaggggcacgcaggccgacccgtcctcgaggtcacggacggcggcacgaattttggtgagactcaccccaaccaacaccgtccgtgcaggcctgaggctgggatcccgtgctgcttcccccgtctccgcctgggatttcatcatcatggtcggccctttgcgactgctgtcatcaggagaggttcccttctaccccgtggaaaggtgaggccggagcctcagagcctggatacccaaacactgccacggagggctcctgctctgccaagcctcggggactagtgtctaagacaaccgtgggaaccactgtgacgggagaaaccgctggcgcctcacgcatgcgcattggctgagccgactcacgctccactcctgacagataggctgcgtcccctttaaatattgccaccgccgcgcggcggccgcgatgctcctgctgccgccccggcagcgcctgtgtcttgggtcctgtttcgggcggcgtgggagagggggccacgggtgactggtcctgtcccaggcccaaacacccagggctcctgtcctcaggacctgcttgagccgacttccaccaagggagggggagcttcaggacgcctgctgtgttctctggactcccgttgagatcccattctggccccctcggagtgacataggatgggctcaccacatgtggtcaggccggcagggcctcgctgcagcacacaatgaccccataggtctcaaggcctagtgtcagagcaaattcactcatccatcagccctctgcctccctcctcctttgaaagtgcagtggcctgccccgcttgtaaaagcccaggggttccggaaagccgaacgcgctttacaggacaactgcaaagaggaacagaggcgaaacccaaggggagaccatgtgaccacgcgtggcactggctaatcccacagcagttggtgttaatgtgtgtcaccggaggcatacggggcgacggcaaaacgaagggtggggtccaggcatgtgccggtggaagggggaaacgggtgacatttccgtcagtgccaaggaaaatcaaaccacacctgggaaccgggaggtgggggtgcagactgtgcctgacccaagccacgttttcaaatgcctaccagaggagcaaagaggtttctgccaatttcgcaacacccccaatcctccaccgacctgctagccctgacgcaacttcggctggtacaaacccacagagattgggaaagaaacacacagagagtgagagacagagagagaagagagaatgggagacacacacacagacacacacgcacacacacgcagagtcatacagcagaggcattgaaacacacactcccaggcaacccctgaggatccggggttctgctctggaggagaacgaccctcgggtgagagagcggcccaggagcacgcaggccgaccagtcctcgagatcactgaccgcggcgcgacttttggcgagactcacccaaacaaacaccgtccgtgcaggcctgaggctgggatcccgtgctgcttccccggtctccacctggggtttcatcttcatagtcggcccattgcgactgctggcatcaggagagtttcccttcgagcccgtggagaggtgagaccggagcctcagagcctcgatacccaagcactgccacggagggctcctgctctgcaaagcctcggggactggtttctaagacaaccgtgggaaccactgtgacgggagaaaccgctggcgcctcacgcatgcgcattggctgagccgactcacgctccactcctgacagataggctgcgtcccctttaaatatcgccaccgccgcgcggcggccgcgatgctcctgctgccgccccggcgtcggctgtgtcctgggtcctgtttggggcggcgtgggagcgggggccgcgggtgtctcgtcgtgtcacaggcccaaacccccagggctcctgtcctcaggacctgcttgagccgatttccaccgagggaggtggagcttcaggacgcctgctgtgttctccggactcccgttgagatcccattctggcccactccgagtgacataggatgggctcaccacatctggtcaggccggcagggcctcgctgcagcacacaatgaccccataggtctcaaggcctagtgtcagagcaaattcaccgatccatcagccctctgcctccctcctcctttgaaagagcagtggcctgccccgcttgtaaaagcccagggcttccggaaagccgaacgcgctttacaggacaactgcaaagaggaaaagaggcgaaacccagggggagaccatgtgaccacgcgtggcactggccaatcccacagcagttggtgttaatgtgtgtcaccggaggcatacggggcgacggcgaaacgaagggtggggtccaggcatatgccggtggaagggggaaacgggtgacatttccgtcaaagcaaaggaaaatcaaacaacacctgggaaccgtggggtaggggggcctcctgtgcctgacccaagccacgttttcaaatgcctaccagaggagcaaagaggtttctgccaatttcgcaacaccctcaatcctccaccggcctcgtagccctgatgcaacttcgctggcacaaacccacagagagtgggaaagaaacacacagagactgagagacagagagagaagagagaatgggagacacacacacacacacacacacacgcagagtcatacagcagaggcattgaaacacacacccccaggcaccccctgaggctccggggatctgctctggaggagaacgaccctcgggtgagagagcagcccaggggcacgcagcccgacacgtcctcgagatcacggacggcggcaaggcttttggcgagactcaccccaaccaacaccgtccgtgcaggcctgaggctgggatcccgtgctgcttccaggtctccgcctggggtttcatcatcatggtcggccctttgcgagtgctggcatccggagacgttgccttcgaccctgtggggaggtgaggccggagcctcagagcctcgatacccaagcactgccacggagggctcctgctctgccaagcctcagggactggtttctaagacaaccgtgggaaccactgtgacgggagaatccgctcgcgcccagcgcatgcgcattggctgagccgactcacgctccactcctgacagataggctgcgtcccctttaaatatcgccaccgctgcgcgtcggccgcgatgctcctgctgccgccccggcggcgcctgtgtcctgggtcctgtttcgggcggcgtgggagagggggccacgggtgtctggtcctgtcccaggcccaaacccccagggctcctgtcctcaggacctgcttgagccgacttccaccgagggaggtggagcttcaggacgcctgctgtgttctccggactcccgttgaaaatccattctggcccactccgagtgacataggatgggctcaccacatctgctcaggccggcagggcctcgctgcagcacaaaatgatcccataggtctcaaggcctagtgtcagagcaaattcactcatccatcagccctctgcctccctcctcctttgaaagagcagtggcctgccgcgcttgtaaaagcccagggggttccggaaagccgaccgcgcttaacaggacacctacctgcaaagaggaagagaggagaaacccaggggaagtccatgtgaccacgcgtggcactggccaatcccacagcagttggtgataatgtgtgtcaccggaggcatacggggcgacggcgaaacaaagggtgcggtccaggaatgaacacgtggaaggggaaacaggtgacctttccgtgaatgccaaggaaaatcaaacaacacctgggacccggagggtgggggggaggtctgtgcctgacacaagccacgttttcaaatgcctaccagagaaacaaagaggtttctgccaatttcgcaacacccccaatcctccaccggcctcgtagccctgacgcaacttcgctggcacaaacccacagagagtgggaaagaaacacacagagactgagagacagagagagaagagagaatgggagacacacacacacacacacacacacacacgcagagtcatacagcagaggcattgaaacacacacccccaggcaccccctgaggctccggggttctgctctggaggagaacgaccctcgggtgagagagcagcccaggggcacgcagcccgacacgtcctcgagatcacggacggcggcaaggcttttggcgagactcaccccaaccaacaccgtccgtgcaggcctgaggctgggctcccgtgctgcttccaggtctccgcctggggtttcatcatcatggtcggccctttgcgagtgctggcatccggagacgttgccttcgaccctgtggggaggtgaggccggagcctcagagcctcgatacccaagcactgccacggagggctcctgctctgccaagcctcagggactggtttctaagacaaccgtgggaaccactgtgacgggagaatccgctcgcgcccagcgcatgcgcattggctgagccgactcacgctccactcctgacagataggctgcgtcccctttaaatatcgccaccgctgcgcagcggccgcgatgctcctgctgccgccccggcggcgcctgtgtcctgggtcctgtttcgggcggcgtgggagagggggccacgggtgtctggtcctgtcccaggcccaaacccccagggctcctgtcctcaggacctgcttgagccgacttccaccgagggaggtggagcttcaggacgcctgctgtgttctccggactcccgttgagatcccattctggcccactccgagtgacataggatgggctcaccacatctgctcaggccggcagggcctcgctgcagcacaaaatgatcccataggtctcaaggccttgtgtcagagcaaattcactcatccatcagccctctgcctccctcctcctttgaaagagcagtggcctgccgcgcttgtaaaagcccatggggttccggaaagccgaccgcgcttaacaggacacctacctgcaaagaggaagagaggagaaacccaggggaagtccatgtgaccacgcgtggcactggccaatcccacagcagttggtgataatgtgtgtcaccggaggcatacggggcgacggcgaaacaaagggtgcggtccaggaatgaacacgtggaaggggaaacaggtgacctttccgtgaatgccaaggaaaatcaaacaacacctgggacccggagggtgggggggaggtctgtgcctgacacaagtcacgttttcaaatgcctaccagagaaacaaagaggtttctgccaatttcgcaacacccccaatcctccaccggcctcgtagccctgacgcaacttcgctggcacaaacccacagagagtgggaaagaaacacacagagactgagagacagagagagaagagagaatgggagacacacacacacacacacacacacacacacacacacacgcagagtcatacagcagaggcattgaaacacacacccccaggcaccccctgaggctccggggttctgctctggaggagaacgaccctcgggtgagagagcagcccaggggcacgcagcccgacacgtcctcgagatcacggacggcggcaaggcttttggcgagactcaccccaaccaacaccgtccgtgcaggcctgaggctgggatcccgtgttgcttccaggtctccgcctggggtttcatcatcatggtcggccctttgcgagtgctggcatccggagacgttgccttcgaccctgtggggaggtgaggccggagcctcagagcctcgatacccaagcactgccacggagggctcctgctctgccaagcctcagggactggtttctaagacaaccgtgggaaccactgtgacgggagaatccgctcgcgcctagcgcatgcgcattggctgagccgactcaggctccactcctgacagataggctgcgtcccctttaaatatcgccaccgctgcgcagcggccgcgatgctcctgctgccgccccggcggcgcctgtgtcctgggtcctgtttcgggcggcgtgggagagggggccacgggtgtctggtcctgtcccaggcccaaacccccagggctcctgtcctcaggacctgcttgagccgacttccaccgagggaggtggagcttcaggacgcctgctgtgttctccggactcccgttgagatcccattctggcccactccgagtgacataggatgggctcaccacatctggtcaggccggcagggcctcgctgcagcacaaaatgatcccataggtctcaaggcctagtgtcagagcaaattcactcatccatcagccctctgcctccctcctcctttgaaagagcagtggcctgccccgcttgtaaaagccgaggggttccggaaaggcgaccgtgctttacaggacaactgcaaagaggaagagaggcgaaatccagggggagaccatgtgaccacgcgtggcactggccaatcccacagcagttggtgttaacgtgtgacacctgcggtaaacggggcgacggtgaaacgaagggtggggtccatgcatgtgccggtggaagggggaaacgggtgacctttccgtcaatgccaaggaaaatcaaacaacacctgggacctggagggtgtgggggacgtctgcgcctgacccaagccacgttttcaaatgcctaccagaggaacaaagaggtttctgccaatttcgcaacaccctcaatcctccaccggcctcgtagccctgacgcaacttcgctggcacaaacccacagagagtgggaaagaaacacacagagactgagagacagagagagaagagagaatgggagacacacacacacacacacacgcagagtcatacagcagaggcattgaaacacacacccccaggcaccccctgaggctccggggttgtgctctggaggagaacgaccctcgggtgagagagcagcccaggggcacgcagcccgacacgtcctcgagatcacggacggcggcaaggcttttggcgagactcaccccaaccaacaccgtccgtgcaggcctgaggctgggatcccgtgctgcttccaggtctccgcctggggtttcatcatcatggtcggccctttgcgagtgctggcatccggagacgttgccttcgaccctgtggggaggtgaggccggagcctcagagcctcgatacccaagcactgccacggagggctcctgctctgccaagcctcagggactggtttctaagacaaccgtgggaaccactgtgacgggagaatccgctcgcgcccagcgcatgcgcattggctgagccgactcacgctccactcctgacagataggctgcgtcccctttaaatatcgccaccgctgcgcgtcggccgcgatgctcctgctgccgccccggcggcgcctgtgtcctgggtcctgtttcgggcggcgtgggagagggggccacgggtgtctggtcctgtcccaggcccaaacccccagggctcctgtcctcaggacctgcttgagccgacttccaccgagggaggtggagcttcaggacgcctgctgtgttctccggactcccgttgagatcccattctggcccactccgagtgacataggatgggctcaccacatctgctcaggccggcagggcctcgctgcagcacaaaatgatcccataggtctcaaggccttgtgtcagagcaaattcactcatccatcagccctctgcctccctcctcctttgaaagagcagtggcctgccgcgcttgtaaaagcccagggggttccggaaagccgaccgcgcttaacaggacacctacctgcaaagaggaagagaggagaaacccaggggaagtccatgtgaccacgcgtggcactggccaatcccacagcagttggtgataatgtgtgtcaccggaggcatacggggcgacggcgaaacaaagggtgcggtccaggaatgaacacgtggaaggggaaacaggtgacctttccgtgaatgccaaggaaaatcaaacaacacctgggacccggagggtgggggggaggtctgtgcctgacacaagccacgttttcaaatgcctaccagagaaacaaagaggtttctgccaatatcgcaacacccccaatcctccaccggcctcgtagccctgacgcaacttcgctggcacaaacccacagagagtgggaaagaaacacacagagactgagagacagagagagaagagagaatgggagacacacacacacacacacacacacacacgcagagtcatacagcagaggcattgaaacacacaacccccaggcaccccctgaggctccggggttctgctctggaggagaacgaccctcgggtgagagagcacgccaggggcacgcagcccgacacgtcctcgagatcacggacggcggcaaggcttttggcgagactcaccccaaccaacaccgtccgtgcaggcctgaggctgggctcccgtgctgcttccaggtctccgcctggggtttcatcatcatggtcggccctttgcgagtgctggcatccggagacgttgccttcgaccctgtggggaggtgaggccggagcctcagagcctcgacacccaagcactgccacggagggctcctgctctgccaagcctcagggactggtttctaagacaaccgtgggaaccactgtgacgggagaatccgctcgtgcccagcgcatgcgcattggctgagccgactcacgctccactcctgacagataggctgcgtcccctttaaatatcgccaccgctgcgcgtcggccgcgatgctcctgctgccgccccggcggcgcctgtgtcctgggtcctgtttcgggcggcgtgggagagggggccacgggtgtctggtcctgtcccaggcccaaacccccagggctcctgtcctcaggacctgcttgagccgacttccaccgagggaggtggagcttcaggacgcctgctgtgttctccggactcccgttgagatcccattctggcccactccgagtgacataggatgggctcaccacatctgctcaggccggcagggcctcgctgcagcacaaaatgatcccataggtctcaaggccttgtgtcagagcaaattcactcatccatcagccctctgcctccctcctcctttgaaagagcagtggcctgccgcgcttgtaaaagcccagggggttccggaaagccgaccgcgcttaacaggacacctacctgcaaagaggaagagaggagaaacccaggggaagtccatgtgaccacgcgtggcactggccaatcccacagcagttggtgataatgtgtgtcaccggaggcatacggggcgacggcgaaacaaagggtgcggtccaggaatgaacacgtggaaggggaaacaggtgacctttccgtgaatgccaaggaaaatcaaacaacacctgggacccggagggtgggggggaggtctgtgcctgacacaagccacgttttcaaatgcctaccagagaaacaaagaggtttctgccaatttcgcaacacccccaatcctccaccggcctcgtagccctgacgcaacttcgctggcacaaacccacagagagtgggaaagaaacacacagagactgagagacagagagagaagagagaatgggagacacacacacacacacacacacacacacgcagagtcatacagcagaggcattgaaacacacacccccaggcaccccctgaggctccggggttctgctctggaggagaacgaccctcgggtgagagagcagcccaggggcacgcagcccgacacgtcctctagatcacggacggcggcaaggcttttggcgagactcaccccaaccaacaccgtccgtgcaggcctgaggctgggatcccgtgttgcttccaggtctccgcctggggtttcatcatcatggtcggccctttgcgagtgctggcatccggagacgttgccttcgaccctgtggggaggtgaggccggagcctcagagcctcgatacccaagcactgccacggagggctcctgctctgccaagcctcagggactggtttctaagacaaccgtgggaaccactgtgacgggagaatccgctcgcgcctagcgcatgcgcattggctgagccgactcaggctccactcctgacagataggctgcgtcccctttaaatatcgccaccgctgcgcagcggccgcgatgctcctgctgccgccccggcggcgcctgtgtcctgggtcctgtttcgggcggcgtgggagagggggccacgggtgtctggtcctgtcccaggcccaaacccccagggctcctgtcctcaggacctgcttgagccgacttccaccgagggaggtggagcttcaggacgcctgctgtgttctccggactcccgttgagatcccattctggcccactccgagtgacataggatgggctcaccacatctggtcaggccggcagggcctcgctgcagcacaaaatgatcccataggtctcaaggcctagtgtcagagcaaattcactcatccatcagccctctgcctccctcctcctttgaaagagcagtggcctgccccgcttgtaaaagccgaggggttccggaaagccgaccgtgctttacaggacaactgcaaagaggaagagaggcgaaatccagggggagaccatgtgaccacgcgtggcactggccaatcccacagcagttggtgttaacgtgtgacacctgaggtaaacggggcgacggtgaaacgaagggtggggtccatgcatgtgccggtggaagggggaaacgggtgacctttccgtcaatgccaaggaaaatcaaacaacacctgggacctggagggtgtgggggacgtctgcgcctgacccaagccacgttttcaaatgcctaccagaggaacaaagaggtttctgccaatttcgcaacaccctcaatcctccaccggcctcgtagccctgacgcaacttcgctggcacaaacccacagagagtgggaaagaaacacacagagactgagagacagagagagaagagagaatgggagacacacacacacacacacacacacacgcagagtcatacagcagaggcattgaaacacacacccccaggcaccccctgaggctccggggttctgctctggaggagaacgaccctcgggtgagagagcagcccaggggcacgcagcccgacacgtcctcgagatcacggacggcggcaaggcttttggcgagactcaccccaaccaacaccgtccgtgcaggcctgaggctgggctcccgtgctgcttccaggtctccgcctggggtttcatcatcatggtcggccctttgcgagtgctggcatccggagacgttgccttcgaccctgtggggaggtgaggccggagcctcagagcctcgatacccaagcactgccacggagggctcctgctctgccaagcctcagggactggtttctaagacaaccgtgggaaccactgtgacgggagaatccgctcgcgcctagcgcatgcgcattggctgagccgactcacgctccactcctgacagataggctgcgtcccctttaaatatcgccaccgctgcgcagcggccgcgatgctcctgctgccgccccggcggcgcctgtgtcctgggtcctgtttcgggcggcgtgggagagggggccacgggtgtctggtcctgtcccaggcccaaacccccagggctcctgtcctcaggacctgcttgagccgacttccaccgagggaggtggagcttcaggacgcctgctgtgttctccggactcccgttgagatcccattctggcccactccgagtgacataggatgggctcaccacatctgctcaggccggcagggcctcgctgcagcacaaaatgatcccataggtctcaaggccttgtgtcagagcaaattcactcatccatcagccctctgcctccctcctcctttgaaagagcagtggcctgccgcgcttgtaaaagcccaggggttccggaaagccgaccgcgcttaacaggacacctacctgcaaagaggaagagaggagaaacccaggggaagtccatgtgaccacgcgtgcactggccaatcccacagcagttggtgataatgtgtgtcaccggaggcatacggggcgacggcgaaacaaagggtgcggtccaggaatgaacacgtggaaggggaaacaggtgacctttccgtgaatgccaaggaaaatcaaacaacacctgggacccggagggtgggggggaggtctgtgcctgacacaagccacgttttcaaatgcctaccagagaaacaaagaggtttctgccaatttcgcaacacccccaatcctccaccggcctcgtagccctgacgcaacttcgctggcacaaacccacagagagtgggaaagaaacacacagagactgagagacagagagagaagagagaatgggagacacacacacacacacacacacacacacacgcagagtcatacagcagaggcattgaaacacacacccccaggcaccccctgaggctccggggttctgctctggaggagaacgaccctcgggtgagagagcagcccaggggcacgcagcccgacacgtcctcgagatcacggatggcggcaaggcttttggcgagactcaccccaaccaacaccgtccgtgcaggcctgaggctgggatcccgtgttgcttccaggtctccgcctggggtttcatcatcatggtcggccctttgcgagtgctggcatccggagacgttgccttcgaccctgtggggaggtgaggccggagcctcagagcctcgatacccaagcactgccacggagggctcctgctctgccaagcctcagggactggtttctaagacaaccgtgggaaccactgtgacgggagaatccgctcgcgcctagcgcatgcgcattggctgagccgactcaggctccactcctgacagataggctgcgtcccctttaaatatcgccaccgctgcgcagcggccgcgatgctcctgctgccgccccggcggcgcctgtgtcctgggtcctgtttcgggcggcgtgggagagggggccacgggtgtctggtcctgtcccaggcccaaacccccagggctcctgtcctcaggacctgcttgagccgacttccaccgagggaggtggagcttcaggacgcctgctgtgttctccggactcccgttgagatcccattctggcccactccgagtgacataggatgggctcaccacatctggtcaggccggcagggcctcgctgcagcacaaaatgatcccataggtctcaaggcctagtgtcagagcaaattcactcatccatcagccctctgcctccctcctcctttgaaagagcagtggcctgccccgcttgtaaaagccgaggggttccggaaaggcgaccgtgctttacaggacaactgcaaagaggaagagaggcgaaatccagggggagaccatgtgaccacgcgtggcactggccaatcccacagcagttggtgttaacgtgtgacacctgaggtaaacggggcgacggtgaaacgaagggtggggtccatgcatgtgctggtggaagggggaaacgggtgacctttccgtcaatgccaaggaaaatcaaacaacacctgggacctggagggtgtgggggacgtctgcgcctgacccaagccacgttttcaaatgcctaccagaggaacaaagaggtttctgccaatttcgcaacaccctcaatcctccaccggcctcgtagccctggcgcaacttcgctggcacaaacccacagagagtgggaaagaaacacacagagactgagagacagagagagaagagagaatgggagacacacacacacacacacacacacgcagagtcatacagcagaggcattgaaacacacacccccaggcaccccctgaggctccggggttctgctctggaggagaacgaccctcgggtgagagagcagcccaggggcacgcagcccgacacgtcctcgagatcacggacggcggcaaggcttttggcgagactcaccccaaccaacaccgtccgtgcaggcctgaggctgggatcccgtgctgcttccaggtctccgcctggggtttcatcatcatggtcggccctttgcgagtgctggcatccggagacgttgccttcgaccctgtggggaggtgaggccggagcctcagagcctcgatacccaagcactgccacggagggctcctgctctgccaagcctcagggactggtttctaagacaaccgtgggaaccactgtgacgggagaatccgctggcacctcacgcatgcgcattggctgagccaactcacgctccactcctgacagataggctgcgttccctttaaatatcgtcaccgccgcgcggcggccgcgatgctcctgctgccgccccggcggcgcctgtgtcctgggtcctgtttggggcggcgtgggagagggggccgcgggtgtctcgtcgtgtcccaggcccaaacccccagggctcctgtcctcaggacctgcttgagccgacttccaccgagggcggcggagcttcaggacgcctgctgtgttgtccggactcccgttgagatcccattctcgccccctccaagtgacataggatgggctcaccacatctggtcaggccggcagggcttcgctgtagcacagaatgacctcataggtctcaaggcctagtttcagagcaaattcactgatccatcagccctctgcctccctccgcctttgaaagagcagtggcctgccccgcttgtaaaagcccaggtgttccggaaagccgactgcgctttacaggacaactgcaaagatgaacagaggggaaacccagggggagaccatgtgaccacgcgtggcactggccaatcccacagcagttggtgttaatgtgtgtcaccggaggcatacggggcgacggcgaaacgaagggtgggatccaggcatgtgccggtggaagggggaaacgggtgagatttccgtcaatgccaaggaaaatcaaacaacacctgggaaccggggggtgggggggccgactgtgcctgacccaagccacgttttcaaatgcctaccagaggaacaaagaggtttctgccaatttcgcaacacccccaatcctccaccggcctcgtggccctgacgcaacttcgctggcacaaacccacagagagtgggaaggaaacacacagagactgagagacagagagagaagagagaatgggagacacacacacacacacacacacacgcagagtcatacagcagaggcattgaaacacacacccccaggcaacccctgaggctccggggttctgctctggaggtgaacgaccctcggttgagagagcagcccaggggcacgcagcccgacccgtcctcgagatcacggacggcggcacgacttttggcgagactcaccccaaccaacaccgtccgtgcaggcctgaggctgggatcccgtgctgctttccccgtctccgtctgtggtttcatcttcatagtcggccctttgcgactgctggcatcaggagagtttcccttccagcccatggagaggtgagaccggagcctcagagcctcgatacccaaacactgccacggagggctcctgctcttccaagcctcggggactggtttctaagacaaccgtgggaaccactgtgaccagagaaaccgctcggtcttcgcgcatgcgcattggctgagccgactcaggctccactcctgacagataggctgcgtcccctttaaatattgccaccatcgcccggcggccgcgatgctcctgctgccgccgagtcggcggctggatcctgggtcttctttggagcggcgtgggagagggggtcgcaggtgtctcctcctgtcccagtcccaaacccccagagctcctgtcctcaggacctgcttgagccgacttccacaaagggagggggagcttcaggacgcctgctgtgttccccgggctcctgttgcgatcccattctggccccctccgagtgacttaggatgggctcaccacatctggtcaggccggcagggccttgctgcagcacagaatgatcccgtaggtctcaaggcctagtgtcagctgcaaattcactgatccatcagccctctgcctccctcctcctttgaatgagtaatggcctgccccgcttgtgaaagcccagggggttccggaaagccgaccgcgctttacaggacccctgcaaagaggaagagaggggaatcccagggggagaccatgtgaccacgcgtggcactggccaatgccacaacagttggtgttaatgtgtgtcatcggaggcatacggggcgacggcgaaacgaagggtggggtccaggcatgtgccggtggaagggggaaacgggtgacctttccgtcaatgccaaggaaaatcaaacaacacctgggaccccggtggtgggggggccgcctgtgcccgacccaagccacgttttctactgcctacgagaggagtaaagaggtttctgcaaaattcgcaacacccccattcctccaccgacctggtagccctgacgcaacttcggctggcacaaacccacaaagagtgggaaagaaacacacagagactgagagacagagagagaagagagaatgggagacagagacacagacacactcacacacacacacacacacacacacagagtcatagagcagaggcattgaaacacacaccctcaggcaacccctgaggctgtggggttctgctctggaggagaaccactctcgggtgagagagcagcccaggggcacgcaggctgacctgtgctcgagatcacggattgcggcacgacttttggggggaatcaccccaaccaacagcgtccgggcaggcttgaggctgggatcccgtgctgcttccccaatccccgcctgaggtttcctcatcgtgctgggcactttgggactcctggcatccggagaggttcccgccaaccccgtggatagttcagggcagagcctcagagccccgtcacccaagcactgccagggagggctgctgctttgccaagcctcggggactggtttctaagacaaccgtgggaaccactgtgacaggggtagccgttcgcgcctcccgcatgcgtattggctgagccgactcgtgctctgctccgggcagtcaggctgtgtcccctttaaataccgccaccgccgcgcggtgtcagcgaggttcctcctgctgctgcggcggcggctgtatccggggtccagtttggggcggagtgggagaggggcccgcgggtgtcttgtcctgtcccagggccaaatccccaggagtcttgtcctcaggacctccttgagccgacttcctccgagggaggggaacttcaggatgcctgctgtgttcaccggactcccgttcagatccgattttggacccctctgagtgagataggatgggctcaccacatctggtgaggcaggcagggcctcgctgcagcacagaatgatcccataggtctcagggcctacttgtactgttgtacataatgtatataattgacttttattcactcgacaaaatttcctaaaaatacatccaaatgattccgttaattaatattttgttcctttgatgactgaatagtatttcatggtttcttgtataaattcaccacaaattaaacattcacctgggcttattgaccttttcaactgtaacaaattaagctgttgtagacattcatgaacaagtttttgtgggaacacaagtttcattactccaaattaaacacccacaactgcaattgctgggatctatggtctatgcacatctggtttttattttactttgaaaaatttttaattattttcttaaaattttgtgggtacattgagtgcccacagaagctagtaaggatactggggcattggagaggaggtagagaaggttaatcagcagaaaaaaaaatgtggaaagaatgaataacatgtctgtatttttaaaaaactgtcaactatttttcagagtggctctattattttacttttccactagcaacgtatgagtgatcctattttttacatcctgaataacttttgctattgtcacaatttttaaaagacattttgataggtgtgtagaaatatttcactatggttttatttgacatgtccatgatgattaataatattgaacatgtttcatggattatttgacatctgaatatttttcttgttaaaacgtccattgatgtcttttgtccattacctaattggatcatttgcatttttttaaaaaagttgctgttgagttttgtgtcatctctatttatttttgtcggttttgatagatgtttatcaattgattgattttttcaataaaccagctttttgtttcacattttttctgttttcaatttcatgaatttttgttattgtcatgattatttttcttcttctgcctgctttcagtttactctgttctttttctagttttttgagatacaagtgtatgttattgatttgagatcttttctcatttttaatgaagcatttagtactataaatttctttcccaccacagccttagctgtatttcctatattttgatatgttgtatttttctttcatttgtttaaatatatttttggattttaatttaagactttatattgtatccatagatcatttggaactgtgttgtatagttgaaatgcatttctattaatatattaattatattaatatatcttccttctttgttgatgttcaaaattccttttttttctttattttgtttgaataacagttttagtaaacatttaatggtaagcttgctaacaacaaatttttaaacaattcaaaaaatataattttcctttactccagaagcatagttacaacatctgtagcattcagagttggcagctcttttctttcactacctgaaaaatattatgtaacttgtttctgacctccattgtttcagatgaaaaaacgtattttcatttacattggttttcctctataggtgatgtttcacctataggtgactgtttctatctggctgcttttaacactttgtctttagttttgtcaacgacctacactggggaaaggacacaatctccaatacatgcttcttgaaaaattggatatccatatgcagaagaatgaaactaaactcctatcactcaccttatacaaaaatagactcaaaatggattaaaaatttaagtgtaagacatgaaaaattagactaccatacactgttggtggtaagttaaattatttcacttattatgaaaaactgtatggtggttcctcaaaacaaaaatagagacaccatatgatctagtgatcccactactaggtgtttatccaaaggaaagtaaatcattacacttaagaggcatctgcacctccatatttattgcagctgtcttcacaataacaaagatatggaattaagctaaatatccatcaatggatggatagataaaacatgtggtatatacacataccaaatttgtatatacattcatatatatatattatatatatgaatactattctgccataaaaagaatgaaattctgtcatttgcagaatcatggataagactagtgaacattacgttaagtggaataagtcagacacagaaaaattaatactgtctgtccttacccatatgcaggagctaaacaaatttgagctcattaaagtaaatggtagaattgtggttattagatgttgggaaggatgtgggaggggaggttggttaatggacacaaaattatagctatatgggaggaataagttctgttgtagtgctctatagctggtcgcatggaaataactataatttatggtatattttcaaaaagctagaagagaggattttgaatgttgtcaacacaaaagtatgataaatgtttgaggtgtttgaaatgctaattaccctgatttgatcattatgcattgtacacctgtatcaaaatatcactctgtttccataaatatgtacaattattgcatgccaactaacaataaaaggacaagataaagattcaaaaaataggaagaaatatcatttttctgatacaatttcttctcggtgtgcccatgttgtttcatgattgcaaagcgttcttttaagtgcttgtaaaatattgttttcatgcttcttaaaattgcttccagaagtaatgtcaaactcattcacctatagtttatgagctctatcttcctttaaaaaactagtacactgcccatttcttgtcttctaaaacttttactattctccataatcctcaaagatatatagagaaacttaaaaatctctttcctaaactttcttattgttttggagtgagttctactccaatactagggcccagagctcatagtgcctcttcgttcatcttgagatttaattaaaagcaatgttgagtcttctcttttggatctaaagatctatttgatgagaaagactgaagaaaaataaggataagggtatttcctccatgttttcatggcacaaaatctttgtttgctaactgtgataagcagaataatgcccccccaccccccacaagactgtctctgtcctattctccatgtcaggaaggatatgctatgttatataagaatatatgatgttacaatgcaagaaagtattaaggttgcacatgacattaagcttactaaacagcagaacttaaaataagagatcatacttgattatctagggggggccaatttaatcacaaggatcctttaaatgtggaagagtgtggtagaaaatatttaaagatactacattgttaattgtactggaggaaagaaccaagagacaaggaatggggaaagcagacaagagacaagaaatgaagacagcccctagaagctggaaaaggcaagaacatgtattctcctttagagtccccagaaggaaagcagcgctgctgacaccttgattttagcctaatgaaaaccatttaagacttctgacctttataattttaaaatgatagatttatgtttctaaactaccaaataaaaatattttgtctttagtttttaaaagtttaatcaaaatgtttcttgaaatgtgtttattccgtgtagggtatcttaggcttcttgaatctatacatttgtgtcttctgcaaatttgaggtttttttgaagcactatttcttcaagtattctttcagcctcattttacttcttttctggtacacgtaataaaaatgttggatctttgttgttgcctcacacatacctacatctgtgttcattttatgtatcagtctattttatttatgttgttcaaattggttaaattctactattctgccctcacattcactgattttaccttctcgcatctcaatggcgctattgactccatccaacacatttttcatttctgttaccgtgtttgtttgcttttataatttacatttagttctttttgttgttgtttttttacaactcaagtttggttaatattttgtgattttgttatatattttaagataatttctatttgatgttgaaacatttttgctagatattttaaaatcatattcagatgattccaacatctgatgcgttttggtgttggtgtcagttaactgtcttttttcactcaaattgttattttcttggttctttgtatgattggtgatttgtaattatattctggacattttgtctatcatggcagacaattgtgagctctatttaaactgttccttttggcaggcagtcacactgtttagctttagcatgtacatcctgggtgtggggcaggtacactgtgtactatttactagcttgtctgagttcagttaaacagaacacactcatatgcaacaaattacataaggcagatgtatcatttacagacaaacagcaagagacaacaggtacctatgtgagccggtccattatgagccagtagcccaaggctcaacaaagttgtctgaagtggatggagtgcatgtgaagtgcctgaggtggatgcagtgattgtgcatgccccacttgtaccacagttgagggaccccacaagacagcttgccctaggttacacacctcaggaccaatgggaaactatggcctaaagttttgaagaacattctctgtcaagggagagagtaacaaggcctaggctgtttcaggccattcttccctgtctcaggatattgcattctcagcatatactacagttgctcttgacaactgcaagcaagaaagaggggataattgggtcagtccaaggacacctggaaagttgacctgcagtctcctgctccaaccaagatatttcccttagaaaaggtggtgtatttcatatgcccattgacctctccagatctggaggtggaggtttgtcttgtcagatcaatgtaacaccttggctgactctgtctcagtgaaacatcattgagtcatagccagaatacattttactagtcccaggaggactactaccactagcagcacagccagacctctctgcagtagtaatgtagctctgggtctcaaagatctaggtaagaggttgccatagaggttaaagaaggattcttcaggtggccccactgtctacaaccaatgggtcagcttctggatctcctctacctatgtttctacaatacctaagatgtttatcccaatacagtaagaggtgttggcaattgtatacacttctcccagttgagctaaaagaaagtcgggagggccgagtgtggtggctcatgcctgtaatcccagcactttgggaggccaagataggtggatcacctgaagtcaggagtttgagaccagccagacaaacatgcagaaaccctgtctctacaaaaaacaaatacaaaattagccaggagtggtggtgcacgcctataatcccaactactctggagtctgaggcaagagaatcacttagacccgggaggcagaggttgcagtgagctgagatcataccactgcactccagcatgggcaacgagagcgaaactccatctcaaacaaaaaaagtctggaacaattctgttggttaaaataactttctgggtggatctgggagatgtttccttggcttctaagacagtggcaatggaggaggcaatatttgccatggtttggggcaggtttcttttcattttttatgagcaataactcctatgaatggtaccaaagatctcataaaagacataaacccaaagtcagttacacatccagtcaggtctttggtaagtctggtatacagcattaggctcctgagtcaatggagcacttcattttgggggtgaattctaggagcatccctagcacactcaatggggcaggacctgtaagttttccaggcatgactttgcccaccccgtatttgagtcaccccagattgcccacagataaagatgtagccctctggcacacacagaccccctgtgctagtattatttatgaggatgaaggtattggcactcactagctaagtctcattgatggcagtagttgcctgagttttcctcatacagtttaccccatacaatcctaaagcctctacgcagagggctagcactctccgatacttgttatcttcatcatcatgaacacacatctttgtaattaaaggagcctggtgcatcaaagcacctgcccaccaaagattcgttagttgtggtcatgacatttttccacaaagttatttaagttaaaagatagcacctttgaattcttcctatgtggcatgtgctaggtcctcactcagtaagctaggacttaaggtccattactgtactctgtggcattaggagtgctagagtagttaaccactggcaagatgaaaggatcattctagtcaatgagagaacaaggtcgtggatggagcatccagcactttgtcaggttacccatggtgtaaccatggcactttggaagaggccactaaggcattatgctcacaggcctataatgccccatccttgtggaaaagcagactgacagtttaatgcccacctctcaccctttccagggtctcagatgttctctacctattggataagaattaggctgagttggtatagcaacccggtctctctgttttagtcccaagctacttctgcagacacccattgcccttgttgcttgactcaaacctttctgcctcaatcatccactccagtacaaagttggcatatctcataacatcatccacccaaatggaaggatcagaggtatccagcatcattagagggattctagcagtctgtcattccttagtcctgtactccacccctgtggaatccccttataggggaggtacccaagggaagtataaactccagattagagacagcgtggcctctctggagtactatggcaccctgaactgcaattcatccccaggacatgtactctataggggaaaaggaaaaagaattgttgagaaagactgagactttacaggcacagacagcctagtcaggtgggtttctcatccacctccaccccaaccaagctcagtgtccctcaatatgcactgcagtgctgtttcctttgcattggtgcatagtgtttagtgttcctattgccctagtcagatgggctaccccctcactagcaggacatcttgatgttctttcttcagttgttttgtgagttccattattcaataactctattagcctgaggatgacaatgtatttaaaaagcccatcttttttcactaatgtgtacccattatctagttgcttgaatagcaaaaaatattccttggtccaagtaaaatcccatgggctatgtaaaaggatggcagaaattcctctcaagtgtggctatagttacctcagcacccatatgattgacatatatttgtctttttcagacaacaagctgtttttcttagtccttgtcctcacatggatatcctctaacagtccaatccttccattgccactgtcctgatcagatggctaggcttttggcaatggcccataagtcactgaaaatatagcaagatatgcgacagaggtagcctgcatggccatcaccactgcatttagtttggcccattgggtagaatgcccatgtccagtctcagtcaaaagatagccatccagtggctgaatggtggtccagtgcatgttgtctggcagagctatcagtaaaccatgcctgtcaggcttctgagcccaagctaaaccatcatatcccctgtgacctgcacgtatacatccaggtggcctgaagcaagtgaagaatcacaaaagaagtgaaaatggctggttcctgccttaactgatgacattactttgtgaaattccttctcctggctcagaagctcccccactgagcaccttgtgacccccgcccctgcccgccggagaacaatcctctttgactataattttccactacctacccaaatcctataaaacggccccaccccatctcccttcactgactctcttttcagactcagcccgcctgcacccaggtgaaataagcagccttattgctcatgcagtgtctgtttggtggtctcttcacatggacgtgtgtgacatttggtgcctgttatcacccccctgctacagcatgggcttgtaaaacctataaactctccttacaattctcccattttacctattcaaacaccagacaagtcttacaggttagttcaggatctgctctggccatcatgtctccgtgcagcagttgccatcaccctaatgcttttagaggccctaaaaatcacaaactgtgctcaactcactctctacagttctcataacttccaaaatctattttcttcctcacacctgatgcatatactttctgctccccggctccttcaattgtactcactctttgttgagtctcccacaattaccgttgttcctggcccggacttcaatctggcctcccacattattccggatatcacacctgacccccatggctgtatctctctgatccacctgacattcactccgtttccccatatttcattctttcctgttcctcaccctgatcacacttggtttatcaatgacagttccaccaggcctaattgccactcaccagcaaaggcaggctatgctatagtgtcttccacatctatcattgaggctaccgctctgccccactcctctacatctcagcaagccaaattcattgccttaactcgagcgtcactcttgcaaagggactacacatcaatatttaaactgactctaaatatgccttccatatcctatgccaccataccattatatgggcagaaagaggtttcctcactgcgcaagggtcctccatcattaatgcctctttaataaaagctcttctcaaggccactttacttccaaaggaagctggagtcattcactgcaaaggccatcaaaaggcatcagatcccattgctcagggcaatgcttatgctgataaaatagctaaagaagcagctagcattccaacttctgtccctcacggccagtttttctccttctaattggtcactcccacctactcaccgactgaaacttccacctatcaatctcttcccacacaaggcaaatggttctttgaccaaggaaaatatctccttccagcctcacaggcccattctattctgtcgtcattgcataacctcttccatgtaggttacaagctgctagcccacctcttagaacctctcatttcctttccattgtggaaatctatcctcaaaaaatcacttctcagtgttccatctgctattctactactcctcagggattattcaggccccctcccttccctacacatcaagctcagggatttgcccccacccaggactggcaaattgacttcactcacatgctctgagtcaggaaactaaaatacctcttggtctgggtagacactttcactggatgggtagaggcctttcccgcagggtctgagaaggccaccacgatgatttcttcccttctgtcagacacaattctttggtttggacttccctcctctatacagtctgataacggaccagcctttattagtcaaatcccccaagcattttcttaggctcttggtattcagtaaaacctttatacccctcaccatcctgaatcttcaggaatggtagaacggactaattgtcttttaaaaatacacctcaccaagctcagcctccaacttaaaacaaaaaagaggactctgtcaaggatagagccccaaaactcaccaaccaaacaagtaattatgctgaacccccttgagcactctctaattggatgtcctgggtcctcccaattcttagtcatttaatacctgtttttctccttcacttattcacaccttgtgtcttccgtttagtttctcaattcatacaaaaccgcatccaggccattaccaatcattccatatgacaaatgctcctcttaacaaccccgcaattcttaccacaaaatcttccttcagcttaatctctcccactctaggttcccatgcctcccctaatcccactcgaagcagccctgagaaacatcacccattatctctccatagcaccccccaaaattttcaccaccccaacacttcaacactattttgttttatttttcttattaatataagaagacaggaatgtcaggcctctgagcccaagctaagccatcgtatctcctgtgacctgcacgtatacatccagatggcctgaaacaagtgaagaatcaaaagaagtgaaaatggctggctcctgccttaactgatgacattactttgtgaaattccttctcctggctcagaagctcccccactgagcaccttgtgacccccgcccctgcctgccagagaataaccccctttgactgtaattttccactacctacccaaatcctataaaacggccccaccccatcttccttcactgactctctttttggattcagcctgcctgcacccaggtgaaataaacagtcttgttgctcacaaaaagcctgtttggtggtctcttcacactgatgcactgatgcatgacaatgccatgctatcagtaagcatgtctctgagtcctgggccccaggtcaccacaggagaatccaatggatccttacaggttgcttaaaagggatagtttgttgtagtcctgaaataataaagtaatgtcctattctccacttaccatgtagtattgcttttgttaaataatccattggggcttgggtagtttaggtgggtcctttaggcaggatatgccccactgttatggcttgaattctgagttgtcaaagagtatgtccccttaggcaatggtgatttttgtgttacaagaagtcggggggtcaatgccaataatgcactcacaagtgagaaccatggtcactaacatccaatatggaccaaagccacatcacaggtagataagcactactggtcaatgcattcattctaaaaccttccagtgtcaccagtttttctccctaagaggacctggaaatattatgtggactcatgtatcaaaaaaaaaagtctgaatttctttcttttctcctcttaccttgacagaaatataaggcctttggcctccatttggggaccctgagaccttggtcccatttctgactctgccattcagcccaagacattggatttgcaatgtcctttcatcaaagaaatatacctggcctttctctatatctgtcctttagataatgagtctccctttctgtgaaggcctttatcacatgtattgattccttctcagatgcctcaaggaagatctgaggacccctttcttctttctctctcaggtgccttagtgtctggttgagtacacacttccctcactctctgcccccatgaatgacagggtaattaaataaatatccccaaccaaggaacctatgctcctctatttcctctttgccttttgtttgccttgatccatgcagccatctcattcacatctgtgggaagtggcagacctacatcccacttatcacccttccttcttctgaaaatattcaatccccatgcccccaggctgccgtctttcccctgggctgggtactaggaagtatcacccctcctgcttctcaaataagctatgattacattagatggggccctgcttgctggacgcattttgtggattaggtttactgtgtgctgcttaccagcttgtctgagtgcaggagacagaatacactcatatgcaacaagttacacaaagcagatttgtgacttacaggtaggcagctagggacaaaagaatgctaggatctatgatgagctggttcctgaagactcgagaaagctgtctagggcacattgagtctcagctgtgcattccccacttgcaccacagctgaggggctcttattattttttttttttttgaggtggagcttggttcttgttgcccaggctggagttcaatggcatggtctcggctcactgcaacctctgcctcctgggttcaagcgattctcgtgcctcagcctcccaagtagctgggattataggcgcctgccaccactctaagttttttatatttttagtagagacggggtttcactatgttggccaggctgatcttgaattcctgacctcaggtgatccacccaccttggcctcctaaagtgctgggattacaaggcatgagccaccacgcccagccaggactctttaagacagcctgttcagggttatatacctcagagccaatgtgaaacattgatttaaagctttgaggggcatcgtgcttccagaggaaagagcaacaggcccaggctagtccagtcagcccctccttatctcaccatgatgtattcccagcataatctacagtaattattaagacctacaaggaagaaagggaagagaactgggtcaatccaaggccacatggagaactgtcctgcactggccaattgttttggctgtagtttcaataccaacttaatgtttagagcttttgcattgtgatttcagactctttgattaatatggtgctgctgggaattccactgctccctgttagtgctgcctatggcagtggaagcagtttctccaggttaggctaccaggtgtctgaggtatgtggtgaggggtgtggtagaatcccccaaccaatgtcccctggctactctggggtcattgggaagagcgtcttaggcctgcagggacaaagcagcttcttaggccaggccactttctctactaggtccctcttcctggttctatttttccacctttgtgcttcctggtagcaaaggaagcctcaagctgtactgggaaggagagcacctctcttagcgtttctcctagctgcttctcctggatggtggtgggtgtctcaagctagcggctcctgattgacccaagggaggaaggagcttacttgaggtatcttctgttgctagattgggggattaggaaaaataagtctgaaggccttcttctgtccagtgaggatacacaagatgccttgctgttgtgctgtttcaccattccttgcatatcaaactaactcttctgtttacctccatctcttagagctttttcatgttagtcacatgtgtcattttcaaaatatatagttgtgcataacaaaaagaggcgggaaaaacatggatctgtgccatattttctgaatccgaagttccttgcatactttatactaaataagctttatctgtgagctatattactagtattttctttgcctataattgtttcaggtgtcacatttaagagtttgcttgattatgatatttaaatattacagaatgtatttgcagaatatatttgcagaataacaatattctgcaaataatgcccttgatattcaaattgaaaatcacttttcgtaatagatcaaggaaattagaacctaatgatttaatggtgtacacaattgcagcattagttttttattcaaagcaacataaaataaatgacaaattgaaagaaaaataggtctttatttactctattcaaatattaaaataaataataatatgtctattgaaatgtcataatcaggatatcatttattccaattaattgattaaataagtaatcagttaaatgtcatagattttatttttatttttatttttatagagagaagatgccattctgtcaccaggctggagtacagtagctggatcataactcactataacctcaaaaaagcctcccaagtatctgggattacaggtgtgagccacaatgataggctaattaaatttttaaattttctatagagatgaggctctccctgttacccaggcttgtcttgaactcctgggctcaagggatcctcccacctcagcctcccaaagtgataggattacaggtataagccatcatgcctggccctagaatttttaaattaatggtggttgatacacatatttacattgtattttagccagatttactgaggtataatttacttatgcaaaatttactaatttatttatttatttatttattttttgagacggagtctcgctctgttgctcaggctggagtgcagcagcgcaatctcggctcactgcaagctccacctcctgggttcgcgccattctcctgcctcagcctcctgagtagctgggactacaggcgcctgccaccacacccggctaattttttttgtattttgagtagagacggggtttcaccatgttaaccaggatggtctcaacctcctgacctcgtgatccacccacctcggcctcccaaagtgctgggattacaggcgtgagtccctgcgcccggccgaatatttccattatagcatatactcgaatgcgtcttaaagtatttataaaggtaatactcattgtatttacttatttgactttttaattagattataaaatccagttaccttttagtatgctcaaaattgtgtcaaataatattaatccttgagttaattatacattataaattattgtctcaataaaatttcatgtacactttcactctgtaaagctggaatgcatgtggagttgcttcaatttttcttttttgtttgtttttttgagacagagtctcgctctgtcgcccaggctggagtgcagtggtgggatctcggctcactgcaagctccgcctcctgggttcacgccattctcctgcctcagcctcccgagtagctgggactacaggcgcccgccatcgtgcccagctaattttttgtatttttagtagagacggggtttcaccgtggtctcgatctcctgacctcgtgatccacccgcctcggcctcccaaagtgctgggattacaggtgtgagccaccatgcccagcctcaatttttcaattgtattttcacttttctctttttatgcctacctaaatttgttcctataattgaatttgtcatttaggagtgaacatttgtttaagaaaatgtaatctttttcatcagcatactcaatatttcaattttccattatagattataagaataaatctttaggtaatataggcaaacaaaatttaatatatagaattagtttcttacacgattggagagttggtggagcaggtcttgggctgatcttctaaatgattgctagaactcctccagaaaaacgacagagctgggactgttgttccttttgccatgactgagaagctggagaatcaggatctcctgtgcaaccactggcactaaaattatgctaactttgctatttgtttttttcccagtttcaaagtttatcttattaacttaaaatttaaacaaaattgttagtctaaacatcattaaatgtactcatgggaaacatatttacatagagaataataaaataattttttgtaacttgaggcacattgtccattttacaaatgtacttttagaaaaactgctttgagaaacaataattttttctgtcatccttcataaaagctagacaaacatttctcatgcaaatttctttttttttctactttgatgtggaagctgggaagctcgaatgtttgcattttaatttaacaatacaaagaaaaatttcatctgtttctctctacattgttggccttagacttactgtagcagcctccattcatatctcttacaggggtaccttatagtttcatatcaggtcattcctgttcctctttccttttgtgatgcacctcttcttgctaaagattttggtcactatcttttgttttgtgtttacttattttagcttgtatataagttctgttctacacaacatttctgatttacatggcaggaaatgtgtgaaacagtttgccaccttcctgactgatctgggcctaaactgtgcccctatactgtgaataaacagttgcattctctaacacatattttatttgatccaaacaatacattagtccaactaccaaacatacatcttagatcctctgtagctataacattttcaacagtcatatttatggaatccatctccctctgttatgtttttactgttatccaaatagaggagatagatataaatgaactcacactggtcagccagggaccacacagtggcttaaaatatcttaatccaggtatctgcagactaaccctaacctaacagtgagttgctacctttgtttttttttttcctctaagcattaaaatacttctgtcatagctgcttgcttcttgatcataggatctcagccatggttcatatttgaataacacagaatgtcggccacagaactaaggactggacatttggtcctttgtgactgttgttacaggaaagtaaatggttttgttacattgcttgtcagaaaaaaagaataggaaggcaccttctatctcaggctcttttccttaaagaaggtaggtttaatgtaaaacctgaattgtgagtaagcctggggatatcatttttagctgttccaaattgagcaagtacttagtcaaactaccagagttttggaatatgcctgagtaagccagtctgaaatagccgatggtccagcttaagactattcaatatccatgcacctgccttttctaaagcttaaacttcaaaagagtaacagtaacaagtacatgatcctgtcaaatataattcaaatatatgttgcacaaattaaaatgcagtggtcctatccaaaataggtatccatgatattcactcctcttcagcttcagtctcaactatgtcttaatatcctgaaataagataacaaattatgaagttattcaaaccagcctaccctaaaaatgatgggaaaaatggaagataataagacaaacaattatatacatgacaatgcagaagagaagaaaacccaagaatgtattacatacttaattttataactgatcatggaactgtggatggtatttgtaccattctttttatattattcattccacacttctctatagtatcctaaattatccaagtttccacagcaagagcccacccttcatgaacagtgaccttagttgtcttgtcaaattggagttgttttaatcttcccttaatgtttaccacttgacagaaaatccaaaaggcatttgaggagtccaactccaggcagaaaccctatgtgtaatctttcaggcctaaccataggccatgacaatggctttacctggcaggcctcactagagaaagatactctccctataccagaattggcaaacagccagtgcattacaatgtctaatgggagctgcagtctaggactcattccccgctagccaaccatcctcctgtgcatgtctgccattcaagtctcaggcacccccatctgagctatccttattagggaccctcaatataaaacctttgcagagaactccttatgatagggagagagggataagggagaggagaaaggggaaaccttgaaatcattattctctattctgaatcagaactcagtattttcccattcttagcgcttcctcctctttctgtcccaaggacccaggtccataagatgaaaggagctttttgttcatggctccttggtcaaaagatccttgctgagaaaattcccacatctgcatttgtgctgatctacatgaccttggcctggagctgtttcatgggacaaaatggaacattggaggagctagcgatctttcctctttagtttcttgcttaaactatctcagttagtaaagatttgactgttactgtcattttggcttattgttttaattagctatttcaactccatggcagcttagctctttacagcattctggaaagtacataggattctagacatttttactgcttttgttatatgaattacatgtcttcataataaggaattaaggctgggagtggtcacttgtaatcacaacactttgggaggccaaggcgggtggatcaactgacttcaggagtttgagaccagcctggtcaacgtggtgagtgaaatcccatctctactaaaaacgcaaaaattagccaggcatggtaaagtgcgcctgtagtcccagctactcaggaggctgaggcgggagaatcacttgaacccgggaggcgaaggttgcagtgagccgagatgatagtgccatttcactccagcttggacgacagagcaagactctgtctcaataacaataataagaataataaggatttaatatccaaaccattcttgtaacatatttaatattgccattcagtggtaaataaaaataatatacaatcatgccctgcctaataacaacatttcggtcaatgatgaactacctacagaacagtggtcccataagattataatgagccaaacaattcatatatatatatatatatatatatatatatatatatatatatatatatggagagaggagagagagaaagagttaaccattaaacagcctcagacaggtccttgaggaggtattctataaggaagcattgttatcttagaagatgaaagttccatgcatgttattgccctggaagaccttacagtgggacaagatataaaggcagaagacagtaatattgataatcctgaccctgtgtaggcctcagctactgtatgtgtttgtgtcttattaagaaaatgttttaaaagtaaataatataaatttaaaaactttatttttcttttttttattttattattattatactttaagttttagggtacatgtgcacaatgtgcaggttagttacatatgtatacatgtgccatgctggtgtgctgcactcattaactcgtcatttaacattagttatatctcctaaagctatccctccccccctcaccccaccccacaacagtccccagagtatgatgttccccttcctgtgtccgtgtgttctcactgttcaattcctacttatgagtgagaatatgtgatgtttggttttttgttcttgcgatagtttactgagaatgatgatttccaatttcatccatatccctacaaaagacatgaattcatcattttttatggctgcatagtattccatggtgtatatgtgccacattttcttaatccagtctgtcattgttggacatttgggttggttccaagtctttgctattgtgaatagtgcctcaataaacatacgtgtgcgtgtgtctttatagcagcatgatttataatcctttgggtatatacccagtaatgggatggctgggtcaaatggtatttccagttctagatccctgaggaatcgccacactgacttctacaatggttgaactagtttacagtcccaccaacagtgtaaaagtgttcctatttttccatatcctctccagcacctgttgtttcctgactttttaatgatcgccattctaactggtgtgagatggtctctcattgtggttttcatttgcatttctctgatggccagtgatgatgagcattttttcatgtgttttttggctgcataaatgtcttcttttgagaagtgtctgttcatgtcctttgcccactttttgatgcggttgtttgtttttttcttgtcaatttgtttgagttcattgtagattctggatattagccctttgtcagatgagtaggttgcaaaaattttctcccattttgtaggttgcctgttcactctgatggtagtttcttttgctgggcagaaactcttgagtttaattagatcccatttgtcaattttgtcttttgttgccattgcttttggtgttttagacatgaagtccttgcccatgcctatgtcctgaatggtaatgcctaggtttacttctagggtttttatggttttaggtctaaggtttaagtctttaatccatcttgaattaattgttgtataaggtgtaaggaagggatccagtttcagctttctacatatgtctagccagttttcccagcaccatttattaaatagagaatcctttccccatttcttgtttttctcaggtttgtcaaagatcagatagttgtaaatatgcagcattatttctgagggctctgttctgttccattgtagaaaaaagcttatataataagggcataaagaaagaaaatattttttgtacagatgttcaatgtgtttgtgttttaaactaagcattattgcaagagtcaaaaaaattataaagtaaaaaagatacagtaagctaaggttattttattattagagaaaaaatagtttttagaaatgtaatgtagcctaagtgtacagtgtttattaagtctacagtagtgttcagtaatgtctaaagactttgctttttctcaccactcactcactgactcatccagagcaacttctaggcctgcaagtgccatttatagtaaccatcctatacaggtgtacaactttttattttttataccatatctttttattgtatgttttctatgtttagatataaagatgtttatcattgtgtttcagttggctacattatttaatatagtaacctgacgtaagggcttgtagcctaaaagcaataacttctaccttattgccgaagtgtgtagtaggctacaccatctaggtttgtaaaaggacactatgatgttcacctagggaacacatttctcagaatgaattctcatcattaatcaactcaagactgtacttataagtgaatcctctgtcattactatagttcaggtcaccttaagtttcttcttggacttgccaatgaactgtggaattaagaagctctctgcctacagtcttgtttatctattgtaatctgtttcttgtagtccctattttagatctcattaatgtcttgtcacttccattagaataaattataaacactttggatggcctgaagacatttgtaatttatcctaaactcatctctactctcatcgcttgacatctccctcttctacccacacatatatatttaagcccacgtaattactccaattaccccaaattctgtacttctcaccagtgtcttgcaaaacccactccaactaactaataagacttttcatttaactctccagttgtagttgatattctagtttcaaactctattttctgtgtgaaggctgcactgatatcacaattttgtttcttcagtgtgagcattggcagcctgtggcctatggttttggtacagcctgcaaggtaataatggtttttagagatttaaatgattgaaacaattttttaaaataacattttgtagcatataatgattgcataaagtaaaaactgcagtgttttcataaataacaaggttttttttttggacacaagatcattcacttacatgtggtctatagatgttttcaggctattatgtcagagttgagtggttgcaacagaaactgtatgattgtcaaagcctaacatacttaaaatctgacgctttgtagaaaaagttaacatttgatctaaagttttctgtaaagatacatctacattatgtttatcgtaatttatatttatttatctgcctactggttgcagttttgaaaaactataatattccagaaaatagaaactataatatttttaattagacctcaagcaaaattattttaaaatgtggtctcaatttttaagaaagtggggaagaatgcttttttttcttttgttaaacttctttgcttccagtccaagaagtgactgtcatttatttttatcttattgcttcctttctcatattagcttgataagaagtaatgaaataatattcaggtttcttagtagagtcatgttgtaaacatagcttttttttctagccactctcgaaaaatggaaagcctctgctttatgagtcacctaattaatgacattgaattatctagtaagtggactcttcagtttaattaaatatcttcattaacttttcactgcttttaaaaataacatttacacatttatgcaaataggttcatcatgtgtccttaatcagttatttagctttggtgcagagttaataattccaatatttgttcaaactgaagaaaatacaggactcaaaaaagaaaggatatttttattcaggttttgagaaaatcacaagtaaaacccccaacttatttatcaataattgtatgttatatacatttccatatttacaattttgataaaatagttataattatttatctttaataatttaaatattagttatgtatttattggctcatattatttaaattatatatatatttatataatttgcagtctgacaatgcaatagaaaaaaaaacaaaacattttctgagaagaaattcaagccagctgcagaaatgtgcataagtaacaagaagccaaatcctaatcatgaagacaatgggaaaaatgtctctaggccatgtcctaggtcttcacagcagcccctcccatcacagacccagaggcctaggaggaaaaaatgttctctggggacaggcccagggcccctctctgtgtgcagtctagggacttggtgctctacatcccagccactccagctgtgactaaaagggaccaaggtgcagcttgggccatggtgtcagaggttgcaagccccaagccttggcagcatccatgtggagttgagcctgcatgtgcacagaagtcaagaagcaaggcttgggagcctcagcctagatttcagaggatgtatggaaatgcctggatgtccaggaagaagtttactgtgggggagagggggtgatcatggagagcctctgctaaggaagtggggaagggaaatgtggggttggagccccacatagagtccccactgaggcgctgcctgtgtgagaagaggaccaccatcttccacaccccagaatggtaaatccactcacagcttgcatatgcacctaaaaaaaacctcagatgctcaacaccagcctgtgaaagcagctaggtgggaaccgtacctttcaaagccacaggggcagagctgcccaaggccatgggagcccacgtcttgcatcagcatgacctggatgttagacatggagtcaaaggagatcattttgaagcgttaagattcaactgccttgctggagtttggacttgcatggggcctgtaacccctttgttttggccaatttgtcctgtttggaatgggtatagttacccaatgcctgtacccccatagtatcaagaaagtaactaactttcttttgattttacaggcttataggtggaagggacttgtctcagatgagactttggactgtggacttctgagttaatgctgaaatgaattaagacttgaggaactgttgggaaggtatgattggttttgaaacttgaggacacaacatttagaggggacacaggcaaaataatatggtttggctctgtgtccccacccaaatctcatcttgaattgtagctcccataattgctatgtgttatggaaggacctagtgggacataattgaatcatggaggtagtttcccctatactgtccttgtggtagtcagtaagtctcacacgacctgatggttttataaggggtttctgcttttgcttggttcccattctctctcttgccttttgccatgtaagacatgacttttgccttccactatgattgtgaggtctccccagtcatgtggaactgtgagttcattaaacctctttttctttataatttacccaatctcaggtatgtctttatcagcagtgtgaaaacagactaatacactgtctttaacattttttctattgttttgaccttggaaactgatgattatttgtcttcaagatgatctttttgtggagtatcttactgaagttctctgtatttcttgaatttgaatgttgacctctctatctaggttagggaagttctcatggatgatattttgatccatgagatcaaaaatatcaaaagtcaacttttgctaagttgactccattttctctatcctttttaggtacaccagttgtagattcagtctctacataatcccatatttctcagaggttttgttcattctttttcattctttttttctattcttatctgcctgtcttatttcagaaagccattcttttttttttttgagacggagtctcgctctgttgcccaggctggagtgcagtggcgggatctcggctcactgcaagctccgcctcctgggttcatgccattctcctgcctcagcctcccaagtagctgggactacaggcgcccgccactacgcccggctaattttttgtatttttagtagagacggggtttcaccattttagccaggatggtctcaatctcctgacctcgtgatccacccacctcggcctcccaaactgctgggactacaggcgtgagccaccgcgcccggccgccattctttaagctcttagattgtttcctccacatggtctattctgctgttaatacttatgattgcattgtgaaattcttgtagtgtttttcagctctatcaggttggttatgttctctatactggcattttgtctgccaggtcatgcaatgttttattgtgatttttagctctgttgtattggcttacaacatactcctatagctctatgaatttcattactgtttatattctgaatgctatttctgccattgcagcctcagccctgttctgaaccctggctggagaggtgacgcagttatgtggaggtaggaagttactctggctttttgagttttcagtattcttgcactgattctttctcatctttgtgcacttatctaacttcagtctttgagattgcttacctttggacggtattttgttttctttcatcctatttgatgatgtcgaagatttgtttgtgttataaggtagattcagctgactggcttcatttctgggagattttatggcacaacactcagctcccaacttctggactgtgtgctctaactctgggggacttgtattaggccccagctttgttctcttgtgttgggtccatcctgcacactctggctgagcgacacatgaaaaaagtattcagacacagttattttgcctgagaatgcagctaggggactgcactgcttagcatcgccaatgagagtacagtcccactaagccagaaaactttgtattaatttagtacagatttgaagacaaatgcctggagcaaacataatttgtgggaaattaacattgttgacccctgagtagagagcagtcttgcacatgaatgatcaaaggttggtttcctgagacataagtaaaccaatttttctagatatgtttctttacattcccttgttatctaacctttgcccttaagagaatttagctgccttcagctaaattattctccaaagtttttggccttccaaaaaggtttgcatctttccctataatttttcttacatcttctcccatcacccttgaggctggaaattaaagaaagaaaagtaaaattaaaaagagaaagaaacgatctttctgtattaggctgaatcatcccaaaggcagtaacaggcaaagcccagacccaggcaaagtctcaatagcattatctaagaagctagggctcaaagaatgtgctctggagagtctcccagggctccctcaacatagggagaagaaaaacaaattttcctttctcttttgattctgttattcatctaagcagcacagtgaagatcatgagacacctgagcaggcctggattgcagtcccctagatgccatagcaaagtttatgagataagcccatgcaaaacactggaacaagcctagataacagctatctgggctgcatagcaagagtcatatgtaagcctgagttgtgaacttgtcgtagtatgattgactgcctttgttcttcttctgtatccttgcttttgaatcattatactttgcaccactgtaagcttgtttcaagttagaccacccccttttagaagtgtgcataaaaggcaagtgctgtctttgttcagggtccagtctttggatattaatctgctggttctgagtgcactcaataaatatccttctgtttcacctaccaatctctccagtctcctgattcccacaacaacctgatcgatctcttacactgtggctcctcgagatttggagtccactgtgctggggatagcaaactgcagtacctgcagcaaagtattagtggatataggggtgtctgcctctctgcaggtgttcaccacagtattggaggcaaggcagctgttgggggagcaagggccttctgctggagacagagtgcactgctgcactgtaggtggtgatggcttggggtggggtgctggccagtggaggtcttggagccttatctgtggtctgcaagcaggagcaattgctcaggttgtggggggaacccctgctctgtgtgcagcacagcacaagggcagggcactggtgtagatggggcttgatgactctgtgcccaacaaggatccatctgcagtggtggttggtggggcttatggggggtcacactgcattcccatgtgctgttgaagcaagtaaagcccacccatgcagatatatgccagcaaagtgatgtggggagatgtgggcagttgctgtctcatatcaattttaataaatcttctgatattgtctcaaatcttggaaacctgtgtcagctcaaaaagacatccttgtataaaactgaaatgcttctatctttaaaatgtatatgtgatagattatttattcatagtagttgaatttaatgcaattaatgttgtaatgaatacaggacatattaatatgctaagagtagactacttaaatgtttgtattttcagtaactcaaatataagcatgtctataaatgaactaaaacagaattttgcccaaatcactcaaaaaattagttaaattgaatatgtttaaaatatacttaaatactttgtatataatagattgtcaagtaattaaaataatttacatgttttatttaggtgtcctcaactttaaaaatatatatctacatataatttacattatattactgaccacatggctaaatatgatagtttggcagaaatcaattcatattaattatgaaagacctacttttggcaaaaatatttctcaagtttgatatcaattctgactctattattgacattgatgttaaatgtaaacctctgtcaatattcttccagggacagaatatcatgaattagcatttttttttacttatatatcacagtatcacatactcagaaagctgttttgataaaatacaactttatcagtcattgcccaatactgcaattatatgtcacaaatgtatctgtataaccaaacgtaacatatgcaaattttttttgctgattataattaatgaatcaaccaaatgagaaaaaaactctcaattcgatattgacttaaactttccaatttactaaaagtgttggtaatatttgttttaaatatttaaatgtttgaatcatatgaatatgttaaatgaataaatactaatggtatcttttacaagcggacacttcaacattttggagaggtaagtgcatacatattttttgtgtgttcattcacatataaacaatctgtgattaactttgatcatactcctaaaaagactaggatttttttctgttttgtttatttttatataaaatttacataaaatagggtgaacaaatttaagtaatatttataagttttgacaaatgcatatacatatataattaaaatatagtaatgtttactattatgttgtagtaaccatcataccacaaagtccactcatgttctttctcatttaactgcatctccattcccaagacaacaactattctatttacaatagaatagtttttgtcttccagaaatccatatgaatggaaccatacaacatgtacttttgtgtacagattagttaaaataatgtttttgatatccataaatgctgttgcatatataaatagttggtctctttcaataggtaggtggtattttcttgtgtgaatataccagatttttttctatttgttgttgaacacatcagctttattattttggggtaattaaaagttaattcattattacaattcttattcaagtctttctgtggagaagagtttttactccttttgaataagtgcttaggagtgacttgattatagggaagttgggtggatgaataattaattttataaaaaacagccaaattggttttcaaatagttgaaaatttatttaatttaaattgtcattttgtaaaagtatttttaaacatatttttctttggtaggttacaagtgacagtacatgtatagtagttgaatatctgctgacatctatatttttacaaaaataaattctgctttcattcaagtgcacaaatatgacccaataaattttcctaatatctctttctagttaatacctctcattaatgaagcaatcacttttctcatatctgcaccgtagttatatctgtttttggaattaaaacagtgtgcactaatttctgcctggcatcttttggttcaacatgtgtttgagattaattgtgtcattgtgcgtatcaaaagctcattaattgttaattggtgaaaggtaatctctcttgtgtgattatgtcacacaatgtttatccgcttttctttgatagacatttagaatttttcaaatttttgactatcttaaataaagtttccatatacatgtttatacaacttatgttttggttatgttttttctgatcgagggcctgtaaacaccttataatggagttctttgtcatagtataggtgtatgcttaacattatgagaaaataagacatttccaaagagttttcagaagtttttaaaacattttacatttctaccatcaaggtatgagagttccagtagctctaaatccttacaaaactttgtgctgccagtctctgtgaatctgttaaagaaattttaacgtaactacagtttaatataatggaagtttttgttaatgttatctttgtgagtgctggatattttgtatttctgtacaaaatatgagctttttctctaggacacagttaatttgtttaaaaccgcttgatccttttagatacttcttttatgattttttgttgcgttcaactcagtgctcagtttaaatgtaattaatttctacccctgaggcaagaccttttaaattgctttaccaaatgcactgtgaatttagcttttttctttcatttggctggcaaatacaggtataatccaggtcatatgtgaatgtcaggcactggtttttgttgttgttattgtttgtttgtttttaatctttgaagatgcttgtttccctggcagtgagcagattactcacatatatacactaatcagtattctgctaagcactgaaaggagaacatctgtagatatcagagatttctctctttgaatctctagcttctcagacctagaaactctagttaccttagtctcctggatttcttggctttgtacaactctaggagcccactttctctgccccactgctggaaactctagccactaaattagggcagtagcagggtttaactcctttgttttctgtctttcgggaattaattcattccctcatatccagagtattgtatttctgtgggtgtttccttgattttgttttttaagcaagaacataaatctagtcttcgggtagtctttctttaataattagtgaggggtactattatacctcattacatatttgtgtttcttcattcaaaatatttctgttcagagtaaatcctgacatcagaagcaagatattctgaattattttagggtattttgaattcaggaacatttcaaaacggagcagcaggcatgttgatggtatttaacaatgtcatgtctcttattctctgaatattgtcgaagtgtgaaattctcttaagagtcacttgagagcataacaaagctaagaggtgggcaataaatattaaatgttcaaacttgccctcttcacatatttaaacatagcctttcttttcagctacttctaatactctttttagagtaagtcattaactaggaggaataacatctttgaaaaagtgaagcagtgtaggataatgtttcccttatgttaagtgtatctgttaggttttctggtgtattttcagtagacttcaattaaaatatgtaaataaaatgttgtatagtatctttcaaatatagaattctgttttaataaacatgtttatccaaacatatcatgaagtaattattataattagggttgatctatcttttctttatttaataaaatgattattaacattaactttctattttcaaaatttaaaatattatatgttagcagagagaacaatttatagtgatatgtacattttttttccattaagtacactggtatagtttaataataatgcctaataagatcaatggaattatttcttgttcatttatatgtcatttacctaattattctcaaactcagaatgcaaagggaaatcaattatgttactatgcctttgtcataactattgtgtcataaatagcatgcatttagctacacacttcatactattgcaattcaaatattgtgaaataccaactcaatttaccattgttttgtaattttttggaaatgaaaaatttcttgcccacctaaatgtaatcttaactagaatgctttggtaaactttcttaacaaatttttcttcattatacttacatgtattttgtgatataatacaatgtacatacagtttcagttaaatcagtttttaagaagatttgtattttcctcccgatataatgaaaattgatttggcagtgactactaacattacaaaggtggttgacattttaataacttgaatgagaaaatctgcagctccatgtctgtgtgtagcaacacaaatacattttatcaaaaaagaaaataatttgcctgaacagttaactgaagttaacattatttttatttttaatcttcaagattaaatcaggataaacaataccactatactaaaaacataatcaacatacttgatagttttatatgttaggtaatagatttttgatgtgaatacctaaaatggaaaaaagtgagtatttttaattcttggattctaaagcctttataagataaatgatttcaaattacttccttcaaatgtagcacaaattttgaactttatcaatttatttcctttatctacagaggtgatcaaactcttgattttttggtttaatctttactacaggcttatagattatattatttttctcaattattaagtctccacttgcatcaaaaaatgatgcatatctacttctgtcaggtaaaggcaaataatattaatagatatataaatattttataaaatcttcttaaaggaagaaaatggtaagtatgtaaggaactacttgatcaaaaatcaccttgggaggctgagatgggtgtatcacgaggtcagaagtttgagaccagcctggccaacatagtgaaaccacatgtctactaaaaatacaaaaatttgctgggcatggtggtgcatgcctatagtcccagctacttgggaggctgaggcaggagaatagcttgaacccaggaagtagaggttgtggcaagccaagctcatgccaacacactccagcctgggcaacagagcaagactctgtctcaaaaaaaaaagtgtgagaattaattagggctaaagtatctgatatttttcgagaaggttgtttgatccagaagaaactcaatggtgaataagtgagaaggcagtagtagaaatgtcaggcaaaaatgggaagttttcttggaaatccacttcctaaaacctgtgctattgttttaaaggcctgaaatatcagagtatgtttaaagcaaacgattactgacccttgtccctccacttccagaaaaatgtgtggattgctgtcctgaaaatgaataaaccaggttaaatagtagaaatgggaaaagttgtgattttgaagtatagtccacaggctggctgtcacagcaggaagctactaatttaatttatatcgttcttaaagtaatctacagagataactagtaaagataaagaaaatgattctatataggaagtcatcattccaggatttgaggaatccttccaagtaattttggcagaagcagcaagcatcatactttcaaagctaataaagaatgcaaggaaacaggacacattttgcaataagtagcaggaaaaataacagaaaaaagtcacaaaaattgctgttctggtattattacagacacattgaaaaacatgtatttgtattatgttctaagaagtaaatttgaaaatatctgccaaatgaaaaaaatacaatgtaatctttcagttttaacatgaaactaataacaaattttaaagataaatgatattatgactaaaattaaacattaggagcatgagtatgataatattttggacacagcaaaagaactagatcactggaagctaaatcagaaaagcaaatgagcacatttcaatacagtgagatgaaaaaatggaaatgtagaagagtggttatcacaaataatgagttgtgtgaggtgatatatttaaatagagagctagaataaaataaatggagcagataaatatgtgaatacttaatggtttaaactttccaaaatgatgaaagatacatgtgtccattcaagaaacacagtaaatttcaaggaaaaaataaccactgaattaacacttaacaataaatctgatgtgagagaaagagagaaaacaagagccggaaagacagagagagacagagaaaaagaaatccttaaaacaaccataggggaaaaaaaaaagacactttaaaatgtggcagctggactacttattaagagcaacatagtaacctaaatacattttataatttacttcctttcatcacactaaagatatcttgatttacaatcttgatttttaaacccaacatataaatccttaatttatgaacacctgatactcaccaaggaaaccctaaaagacagaagagccaaaatggccagcaagacagagccaggaagatcctccactgaaagagctgactctcaagaaaaccagcacactctgagcagatcttcaaaaggaaagcattgagagtggaaggagagaggatggagacactgggctaaaggatcagaaagctgggaacccagcatgggattgtggagcacaaggactcattcctgaccctgagaggtgaggggaggggtgagttaaatacgatggagtggcttactctttccaaagagctccagaatcctagctttacgagacttcacaatccccatggacattcgagctagcaaggagagttgcttggagaagtagcaaagacaggattccagtacgtgtagagcccagatagtttgacataagaatggttccggtgaagcacagccagggacacccatttcctaaggcttaccacacgcctctgagtgactttggtcattattgattgtcagacctgcacagagaagggctgtcttgcccgtgggatatgccaatgtgattagatgctctcctgtcgactggcctctcctggggtccccgccaggccataccctcttggagggcagctttgcatgcccaacgagggtgcttctcagtggccatcaccatagcagcagactcgactctgctctcactggagagcttctgcaaatatacctccaacagtgcacacctacttacagtcccccctcactgcattgccggcttgcactgtgcacagtctccactcactgtttcgccagtgtgcacatatgcagagtcctcactgcaactgcatgggccccactgatgtgtgtgtgtaaaccctgacaacctgccactgccagggtgagtatgagtataacatgccacactgcacccctgctgcagctggtgcacatgtgcgtaagcatggacccctcagcaaatgctccaatgaagcacttttgttggtatcccccattggactgttgttgccagtggactgagaatgctgtggccctgtcagtgcagcaggtacttcatcttgagggggcatataacaaagctgtgggccaggtccgaatccccccagtgttagagcacacatcccaggagagctgagctgagccttggccacctgaaatcatccagaaatgaagccagtcaattaaatgcaacttatagcatagtaaaccctcaacggcatcaaagtatacaagtaaaaagccccatgcaaaacaaacaaacaaacaaacaaacaaacaaacttcaacgattaaaggaagattagctcacagagatgagaaagaaccagaaccagcataactacactggcaattcaataacacagagtgtctatttttaggtgaccacactaactccccagcaacagctgttaaccagactgaaaagactgaaataatagacagaattcacaagcttgatggcaatgaaggttactgagattcaggagacagttaaaagcccatccaaagaatctaaggaatcaattagaaagaaacaagagctaagagacgaaatagtcatttttttaaaagacccaaactcttgccaggcacagtggttcacacctgtaatcccagcaatttgggaggccgaggcagccaggttacctgagttcaggagttcgagaccaggctggccaacatggtgaaaccccatctccactaaaaatacaaaacttagccaggcatggtggcacacacctgtagttccagctactcgggtgactgaggcaggagactggcttgaattgagaggtagcagtgagccgagatcacaccactgcattccagccttggtgccttggtgacagagcaaaactccatctctcacacacacacacacacacacacacacacacacacacacacacacacacacaaaaggaaagaaagacaatgacccaaactcgtctaagagctgagaaactcactatgagcatttcattgtttaactggaagtattaacagcagaagggactaaactgaggaaaaaaacttagagctgtgagatggattcattgaatcaactcagttaaacaaatataaaggggtgggtcactgtattagtctgttctcatgctgctataaagaactgactgagactgggtaatttagaatcaaaatagttttaattgactcacagttctgcatggctggggaggctccaggaaacatacacttatggtggaaggggcagcaaacatgtccttgttgatatggctgcaggagagagaagtgcaaagtaaagtgggggaaagcccctataaaaccttcagctctcataagaactcactcattatcatgagaacagtatgatccccatgtctaatcacctcccacgatgtccttcccccaacatgtggggattacaatttgcattacaattcaagatgagattttgggtagggacacaaagccaaactatattattctgtccatggcccctcgcaaatctcatgtcctcacatttcaaaacacaattatgcctttccaagaatcccctaaagtcttaactcatttcagcattaaccccaaaagttcaagttcaaaatctcatctgagaaaaggcaagtcccttccacctatgagcctgtaacatcaaaagcaagttagttatttcctagatacaatgggagtgcaggtactgggtaaatacacccattggagatgggagaaattgaccaaaacaaaggagctataggccccatgcaagtctgaaatccaacagagcagtcattaaaccttaaagtttcaaaatgatgtcctttgactccatgtctcacatccaggtcacacagatgcaagagatgggatatcatggctttgagaagctccactcctatggcttggcagggtacagcctcccttctggctgctttcacaggttggtgttgagtgcctgcagcttttcctggtgagtggtgtgagcttttggtggatctatcattctgggatccggagaatgacggccctcttctcacagctccactagtcagtgccccagtggagaccctgcatgggtgctctgaccccacatcttccttctgccctagcagaggtctccatgagggcccttcccctgcagcatacttctgcctagacattcaggtgtttctatacatcctttgaaattcaggctgaggttcctaaagctcaactcttgtcttctgcacacacacaggcccaatatcacatagactctaccaaagcttggggtttgcagtattattaaaatgctcattctgcccaacccaagttacagattcaatgctattcctatcatactaccaacaacgtttttcactgaactagaaaaaaaattcttagaattaatttggaaccaaaaaagtgcctgaatagccaaagtaattctaagcaaaaagaacaaagctgggggcatcacactccctggcttcaaactatactacaaggctacagtaactaaaacagacacatagtgtaatggaacagttttgagagcacagaaataaagacatacataaacaatcatctgatttttaacaaagctgacaaagacaaacaatgtggaaaggacatcttattcaacaaatggtgccaggataacctgctgaccatacacagaagatttgaactggacccctacctttcaccatacacaaaaatcaacccaggatggattaaagacataaatgtaaaacctcaaactataaaatctctagaagaaaaccttggaagtaccattctgaaaatattttgcaagaaataaaacctacttgattgtggtggattagcttcttgatgtacagctagatttggtttgctagtattttgttgaatatttctgtatctatgttcattagaaatatttgtctgaagttttttttttcattgcatctctgccaggatttggtatcagaatgatgttgtcctcatagaatgagttaggtatgagtccctcctcctcaattattttagatagtgtcagtaggtgtggtatcagctcttctttatacagctggtagaatttggcagtgaatcctttgaggtcaacactttttctgattgataggcattgtattgccaattcagtttggaacttcctattagtctgttcaaagtttcgttttcttcctggttcaatctttgaagattgcttcccggaatttatgcagcttctctgggtttttcagtttgtgtacatagaggtgttcataatcatccctgagggttgttgtatttctgtggagtcactggtaatgtcccctttgtctcttttgtgattgtgtttatttgaatattgtctctttttttctttataagtttagataatggcctatcaacattattttttctttcaaatacccaacattcagttttgttgatttttttacatttttttctcatctccattttgttaatttccgttatgattgtggccatttcttttcttctactaccttcgaggttggttcttttttgttttttaggttcctctatctgtgatgttaggttgcaaatttgagatctttctagctgttgacataagtgtttagcacaataaactttccttttaaccatgctttatctgtgttctagagtttctagtgtgttgtatttttgttttcatcagagtctaagaatttcttgatttctgccttgattttattgtttacacaaaagtcattcaggttcaggttgtttaattttcacttaatcctacagttttggcagatcttcttggtattgatttgtatttttattgtgctgtggtctgagagtgtggctggtaacatttttttttatttgttgagaattgacttacagctgagcatgtggttgattttagaatatgtgtcatgtgcagatgataagaatatatattctgttgttgatgtgtggagtgttctgtagatgtctgttaggtgtatttggccaagtgtcaagtttaggtcctgaatatctttgttagttttctgcctcagtgatatgtcttacactgtcagtgaggtgttgaggtctgccactgtcatcgtgtagttatgtaagtttctttgtatatctctaagagcttgttttgtgaatctgagtgatccagtgttaggtgcatatatatttaggatagttaagtcttcttgtttaattgaatccttcatcattacgtaatacccttaattgtctgttttgatcatcgttagtttaatgtcagttttatctaaaataagaacagcaacacctgttcttctttgtttttcatttgtttggtagttctttctccatccctttactttgaacctatgggtgttctcacatgtgagatgggtctcttgaagacagcatacagttgggtcttgattctttatccactttgccactccatgccttttaagtgggtgtttagcttgtttatcttcaatattgacatgtgcacattcgatcctcccagcatgttgttagctggtagttacgtaaacttgattgtgtaattactttatagtgttgatggtctatatacttgagtgtgtttttctggtgctaggtaacagtccttcattttcatgtttagcactttcttaaggatctcttctggtctctaaaggcctggtggtaataaattcccctagcttttgcttatctgaaatggattttatttctcccttgtttatgaagcttagtttggtgggacataaaattcttagttcataattttattttttcaaaaatgctgaatatggattcttaatgtcttctgactgtgggatattgctgagagttcccctgtgaatttgatgtagtttccactttatgtgacctgccccttgtcgttaactgcctttaatatttttttcttttgcattgaccttcaagaatctgattactttgtgtctctgcaatggttgtcttacatagcatcttacatgggttatctgaattttctaaatttatatgtcaatctctctagtgaaattggggaaattttttatagaatcccttatttctccaaggtttttttctttttcttttttttttcttttttttttttttttgagatggagtcttgctctgtagcccaggctggagtgcagtggcatgatctcggctcaatgcaagctccacctcccaggttcctaccaatctcctgcctcagactcctgaatagctggggctacaggcacctgccaccatgcccagtgaattttttttttttgtatttttagtagagacagggtttcaccatgttagccaggatggtctcagtatcctcccaaagtgctgggattacaggtacaggcatgagccaccatgcctgacctttcattttttaaaattcttcttttctttatttattttctggctgtgttaacttaaataatcagtcttcaatctctgagattcttttcttggcttagtccattctgctgtgaatatttccaatcattttatgaaattcttgtagtgtattttgtaactctacctgctaggtttggtttttgtttgtttgtcttgttttgttttttcaaatggctaatttttttctctttaatcattttactggattcctcagattcttggaaatagtgttcaactttctattgaatttcaatgatcttcattttcttctacctctcagttctatatctgtcatttcagccatttccttctatttaacaaccattgctgtagaactagtgcagtcatttggaggtaaagtgacagtctgactttttgagttgctagagttcttatgttggcttttttctcacctgtgtgggctggtgtttctttaactgtggtataatttgagcatagtcagttgactttgtttctggatgttttcaaagcacctttttgcacgatctttattagtagctgaattattgtcctgggtttcacagaggcttatattagcaaagtaattttagtgttgaagtttctgctgcaagctggctgatgacacttaggtataatggctgataggtaggctcttgttcagcctacctacctataatggctgataggtaggctcttgttcatacacaaatgtgtattttctcacatttgcagccatgctccgtgtcagtattctgtgtgtgtaggcttccctcctactgaaatgctggctgcatagcttggcttgtcactgcagtgctgcacatcacagccctgtggtgagctcaaggtttttgtttcctcacaagcttggggacaaaagaggtgaggaccttggcagtggtaatgtctggaggtctatcacttgtcttttgcagctccaccatacagaaatgcagagatgctgccaaatggagtggtcaacctttgatggggcctgtgcattttggaaccaatctgggggacactactggtgatgagcagagggtgtcagggcttgtgagaagatagattcatctcttctctgtagggtagctgcagtgtgctggaggtgtgagtaaagcacttggggtcttgctccctccccagttggagggcagcaagggcagtactgctgaatagcggttgcagagaaactttcagttgcttctgggatctccaccccagagaaatgcagaaccactgccactgggcattttcagccaggagtggggctgctgcactatgagcctttgctggggcccctgcctggtgaagagcaggggatcaggggctcacagagaatagagattgggctccatgccatatggtgatcatatggtaatcatagtgtgctggaagcatgagtaaagcattcaggctcttttatttctttcccagtctaagacagcaagggcaggtaccactgcattggcagtggcagttggctgtcatttgcctctgggagctccatcacaggataacacagagccactggcaatagaaatgttcagcttgggtgaggtagctactctgcaggcccaagcaaggagttctgcttagtgaaggataggagttgggagctcacaaggaagagagactgggctctacgctatatggcagctgtgtcatgatgaaggtgctagtgaagcaaccagcattttgttctttccccagcccaaggggagtttcttagtgcttttttacactgctgataaagacatacctgacactggacaatttacaaaagaaagaggtttaatcaatttgtagttctacatggctggggaggcctcaaactcatggcagaagtcaagaagaggagcaagtcacatcttacatggatgactgcagccaaatagagacctcgtttggggaaactcccatttttaaagccatcagatttcatgagacccattcactatcatgagaacagcatggggaagactcactctcatgattcaatcatttcccactgggtccctcccacaacatgtagaaattatgggaactacaagatgagacttgggtggggacacagagtcaaaccatattattatacccctggcccctcccaaatctcatatcttcacatttcaaaaccaatcatgccttcccaacagtcccaaaaagccttaactaatttcagcattaactcaaaagtccacagtccaaagtctcatctgagacaagtcccttccacttatgagcctgtaaaatcaaaagtaagttaattacttcctagatacaatgggggtacaggcattgggtaaatacagccattccaaatgggagaaattggccaaaacaacagggctacatgccccatgcaagtgtgaaatccagagggacagtcaaattttaaagctccaaaatgatctcccagtaactctatgtctcacatccaggtcatgctaatgcaagaggtgggttcccaaggtcttgggtagctccacccccgtggctgtgtagggtacagcctccctcatggctgctttcacagggtgacattgagtgtcttagtcttctctaggtgcacggtgcaagctgtcagtggatttaccattctggggtctggagaacggtggccctcttctcacagccgcattaggcagtgccccagtagggactctctgtgggggctccaaccccacatttcccttccactctgccctaaacagtggttctttatgagggcctcacccttgcagtgaacttattcctggacatccaggcatttccatacatctgaaatctaggcagagatccccaaacccccatttttgacttctgtgcactcacaggctcaacatcaagtggaagctgccaaggcttggggcttgtaccctctgaagccacagcctaaagtctacattggcccctttcagccatggctggagcagctgggacacagggtgccaagtccctaggctgctcacagcatgatgaccttgggcctggcccacaaaaccacttttttttctcctaggtcaccaggcctgtgatggaaggggctgccatgaagacctctggcatgccttagagacattttccctattgtcttggggattaacattcatctcctcatttcttatacaaatttctgcagctgacttaaatttctcctcagaaaatgggattttcttttctatcagattgtcaagccacaaactttttgaacttttatgctctacttcctttataaaactgagtgactttaacagtacccaggtcacatcttgaatgctttgctgcttagaaatttcttccatgagataccctaaatcatctttctcaagttcaaagttccacaaatctctaggcctggagcacaatgccaccagtctctttgctaaaacataacaaaagtcacctttgttctagtcgccaagatcctcatctccattggagaccacctcatcctggatttcattgtccgtatcattaacatcattttaggcaaagccattcaacaagtctctaggtggttctaaacgttgccacattttcctatctccttctgagtgttccaagctgtttcaacctctgcctgttacccagttctaaagttgcttccacattttcaggcacttttcagtagagcccactctactggtaccaatttactgtattattccattttcatgctgctgatagacagacctgagactgggcaatttacaaaagaaggaggtttaatcaacttacagttccacgtggctgggaaggcctcacaatcatggtgaaaggtaagtaggagcaagtcacatcttacatggatggcagcaggctaagagagagcttgtgtcaggaaactcctgtttttaaaatcattagatctcatgagacccatccactatgatgagaacagcatgggaaatacccatccccattattcagtcatttcccaccaggtacctcccacaaaacataggaattgtgggatctacaggatgagatttgaatggggacacagagccaaaccatatcaggcagcaagggtggtaccactgtatgtaatggcagaggggctgtgggttgtcgctgggaattctatctcagagaaatgcacaggtgccactgtctgaagtgttcaagtgggagcagggtagctgtgctggggcccaggtcgggaggccctacccagtgagaagtagcaggagcaaagacaggcatggaaaaaagtctgacaacacctccataaggcagctgtgctgagctgaagacctgctatagtccttaagcctctttgctatctcttgatctgagggcattatgggcaggggctatagcaggcaaaaatggcaggcctgtcttatacctatgagagctctgtcccagggaaatgcaatgctgcttctggcccaagttgtcaggctgaggtaggtggctgtgctggaggctcaagccaggaggccctgaccagtgaggagtagaaggggccatgactaacattgaaaactatatgactgcttttccagaaggcagcttgccctgtgctggaggcccacaacagtcataacactcttcactccctcctgaccctgaaggcagttgggtagtggctggagctgctatagcagcaaaaacagcagatatgtatgtctattgcatctgagaacttcatcccagagaaatgcagagctgctgccagtcgaagaggtcaagtgggtgtttcatggctgttctggagttctaggtcagtgtgctttgcctggagaggtttaccagaggcaaggcatgaagtccctctgctcctcagaaccatgaatgtagccactaacctctcgcattcagagaacttggccttcttgttggtgaagctatggcaactagcactggggtgcttaggggtctaagacccctgggacttctcatgtgcctgatctggagctctgcccagattctatgcagctctccttgttagtctgaaggccccagggggatcactcagggtggatcacctgtgcctatgattacaaaggtccatgacagaagtgtggggccatgggactctctctcagtcactatttctttgtggtaaggatcctcccctgactccacccaatcctgggtgggtggctgttgtgtcttgctgtttttttctccatggcttctgttgcttccttgctgaatcctaacatgtcctcttggaagatccagttgaagtgctagtgtttactggccagtctatttcgttttcacaagagtggagcatactagctgcttctagtaagtcatcttggcacttgatcacaaaagacatttatttttcacagttctgcaggctggcaagtccaagttaaaagtgccaggagattcaattcttggtaagggttcttcctggcttgcagacagctgccttctcgttgtattttcactaggaagaaaaaagaaggtctagtgtctcttaattggataaatttttaaaaccaaaattattgaaggtgattctaatacacctttctcagtaactcatatacatataccggatgcattattaagattattagtgtatttaaaaatatacaatttctggctgggcgcagtggctcatgcctataatcctagcagtttgggaggccaaggcaggcggatcatgaggtcaggagatgaagaccatcctggctaacacagtgaaatcccgtctctgctaaaaatacaaaaaaaaaaaaaaatagctggatgtggtggcaggcacctatagtcccagcaactagggaggctgaggcaggagaatggtgtgaacccaggaggtggagttttcagtgagccaaaatcgtgccactgcactccagacagggtgacagagagagattccctctcaaaaaaataaaataaaataaataattatataaaaatatacaatttctgcccttatttatctatataatttagtataattattttatgattgcttattattcattttagtagccactttgaaaataattaatgtttgtataaaaataaacattaatttaataaactaacagaatagcatataaatttccactaacatcctatcaaaatttatataattatagtattttataagtcattttagtgctatataaagttaagaaaaatggccaaaagtctaaaaaaattaaaaaaaataaaataggaatagaaaaaggaagaaaatttattttttaagttaaaaaatctttttttaaatgtagagaaatacatgtttttaagagaaaacatacctttaatcacaagaaaaaaatgcctttaaaaataaaaatattatataacataataatataaaagtttctttttgaagtttgaagttgttatagttttaaaattgtatgtatttggcatttcttttattttgctttatgttaacattcaaatttcatcttcgaattttaattatccttaaacatttctaggtgcctgttagttgaattctagacaaaatttatctttacaactttttttattatactctaagttctagggcacatgtgcacaacgtgcaggtttgttacatatgtatacatgtgttgtgttggtttgcgcacccattaactcgtcatttacattaggtatttctcttaatgctatccctccctcatctttttatctgctatacaaatatatttttatgcaatatcagtgtcattaatatagttaatgatatagttagcatagttaattacaaaatgcagtaattttattgttaaatattataactttaaattattattgatggtttttacaatatgtatcatattagtaatacaccttaacacaccaaaagtatgtcagcccataatgatgttattttactcgtttattttagtttcatgtttgaaatttttatgttcagctaatagaaaaaaaataacaagacagagaaatacaaatatagcaaatatcgtccaagcaataatccccgactgaacaatgccaagatatacattgtttgatttcttctttcatttagatatttgcatgaattttaaagcttttgtatattttttattttattaaaaataattttctgtcttgcttaacatgttacttatttaaaaacataaaatatttaatctacttcatatcatccaaatatatgaattagctcattttctcttctctatatatgatcttgtgtctttattcagacaaaatagttctgtcatttaaatgcttccttatctttagcatagtgtgatttttctttttaaaattattatagttcaataatatatcaagctagtgggagaaaagcaaaggtgaattaaactatgtttcagtaaaatgtaaaaaaaaaatctgattttaagtaattactaactatgtacagtcacaaactcatgaaccaacagtatagaagaaataattggtgcgatttgggcaaactagaaaaaaccaagaaaaatgaaaagatctttttatatgatcattcttaattagagccactgacagtgaatgtaagaatgtttaatgaatgtgacctataaagctttgctagattctgactgactcagaggttatatattacttctcacacttctttattaaaattattttatttttaacttaagcatcttttttataactaaagtgacagttatacatgaacaagtataatagtttgtctaaaatattttgtaccaaaacaggaagactgaagtgtgaataatctcagtaaaaaagtataaaatatattttagacatgcagtcattcattgaaatgtacacatgaagtaaatcaagtgacctcattattgaataaattgactgagaaatatatgaggttgaattaatttcttcttccacagaatttttttatttatttcatttttgttcaatgtttcttgatataaagtagattattttctattattttcagatgtctcagaaatctttccagttctttcctatggtcttcaatatgttttaaaaaattaatgcaaaatgtggaccatttaaaaactagattttctcaaagattcagtgttgaaggtagtgtccctggagattatttgttaaagaatgtttaaaactaactagcacatgcctagtctttgacatgatttgttttgtaagatccttgtcatcatgatatgtattcaggaaaaggagtattctcagattacagataaagaagctaattcagacatgtattgagtatgtaacttgatgtgagccataaataaaaatgtgccaaatatattagttaattgtataaatctaaagcattctataatagtatattatctctggctggtgaatctagcaaacacaacatatagttatctctccatataggtggggatcaattccaggggcaccttcatgtaccaaaatccacatatactcaagtttcccagttggccctgtggaacctgtttataggaaaaggcaaccctacagaaaacaccacattttttattgagtttggttgaaaaaaaaatgtgcatataagtggacctgtgtagtgtacacatgtgttcaagggtcaactgtagctgaaagcaaaccacatttagtttgtacatatatttgagagagaatatttgtgaagtgttttatttttaaaaaaaaaagctcactaaagaactaaaagaaccaaaagcaaaccaaaatataaaaaataaacatttttctagctctgcaatttaagacatttactttaaattattcaaatgtacctaaataggaatctaatttaatttcaagtttatgctatttttgaagtaagaaacatgctgtgtcatttatgaaactagaaatatatgattgaaaaagagtctacatagtgagagaacttgaccataatctttgaaagtaaaatcaaatgaaagcttatgtaaaaattgtgatcattaggctttaatttttaaatatgataataaaatgagatattgaatattgctaaaatttttaaatatgttatggtaacagcatacatggaatattatacatttattcaaattatgttttaaaaataatgacataaacatacttcttatacattatgattgaaatgctgaggttttatttaatacataaccaataaagctaagaaacccttaaaaatcaagatgtactccttaaataaaatattgagtgagtacttataaggcaataagttttgtaaaatatgctaaaaatttttaaaaattctctacatattcgagacatacttgaagatactgtgggttttgttccagaccatcacaataaagcaaaaatcacaataaaacaagtcaacaaaaatttttggtttctcaatgcatataaaagttatgtttacattgtactgtaaagtgtgtaatagtattatgtttaaacaaataatgtacttaccttaattttaaaaagatttattgctaagtaatgttaatcatctgagccttcagtgagtcataatgttttggttgctggagggtcttgcctcagtactggtggttgctgactgatcagggttgtgattgctaaaggttggggtggctgtgggaatttctttttctttttttttttttttttgagtcagagtctcactccgtcgcccagtctggagtgcaatggtgccatctcggctcactgtaacctctacctcccaggttcaagcaattcccctccctcagcctaccaagtagccaggattgcaggtgcctgccaccacacccggctaatttttgcatttttagtagatatggggtttcattttggccaggctggtctccaactcctgacctcaggtgatctgctctccttggccttccaaagtgctgggattacaggtgtgagccgccatgcgcagagtttcataagacagcaatgaagtatgctgcattgaatgactctttcatgaaagacttctctgtagcataggatatcatttgatagtacttatccacagtagaacttcattcaaaattagaggcaatcctttcaaaccctgccattgctctatcaattacatttagggactattctaaatcctcattgttatttcaataatgttcacagtatcttcaccaggaatagattccatctcaagaaaccactttctttgttcatctataagaaacaactcctcatctgttggttatattacaagattgcagcaattcagtgacatctttaggctccacttttaatcctagttctcttgctatttccattacatctgcaattactttctcctctgaagtcttgaacccctcaaagtcatccatgaaggttggaagaaacttgttctaaactcttactaatgttgatactttggccttcttccatgaatcacaaatgttcctaatagtatctagaatggtggatcctttccagaagatttttcagatccatcagaggaatcactatctatgacagctacaatcttacaaaatgtatatattaagttataagacctgaaagtcaaaattgcttcttgatccatgagctacagaattggtgttgtgttaggttgcatgaaacaacattaatgtccttgtatatgttcatcagagctcttaggtgaccacgtacattgtccacaagcagtaatatttgaaagagaatcttatatttggattagtacgtctcaacagtgggcttaaagtattcagtaaaccatgctataaacaggtgttctgtcataaaggctttgttgcttcatttatagagacaagtagagtagatctggcataattcttattagccttaggattttcaaatggtaaataagcattggtttcaactgactagctgcactaacccctaacaagagtgtcagtctgtcatttgaagctttgaagccagacattgacttctcccctctagctatgaaaggcttagatgaaatcttctttcaatataaaactgttctgtctacattgaaaatctgttgtttagggtagtcacattcatcaattattttagctaaattttctgaataattttctgaagctttttcatcagcagttactgtttcactttccacttttatgttgttaagatggctcctttccttccaccttaagaaccaacatttgtcagcttccaacttttcttctgcagttttctcttacctctctcagccttcacagaattgaagagcattagagctttggtctagattgcgttttggctgaagataatgttgtggctgatttgactttctggccgaaccactaaaacattccaaatctcagcaataaggctgtttctctttcttactattcctgtgttcactggagtagaagttttgatttccttcaagaattttttctttgcattcacaacttggctaactgttaaaaacaagagttctagctttagatctaagttggcttttgacatgtcttccttgctaggcttaagtatttccagcttttgatttaaagtaacacacatgaaactctttcttacacttgaacacttagagcccattataaggttattaactggcctaatttcactattgttgtgtctcacaaattggagtcactaagagagggagagagacagggaaattctgctcagtggagtagtcagaggacacacaatatgtattgattaagttgctatctcttaaaggtatggtttgtggtttctccccatattacagtagcaacatcaaagatcactgaatacagatcaccataacagatataataatagtgaaaaagcttgcaatattgtgagaatcaccaaaatgtgacatggagacatggagtgagcacatgctgtaaacaaagtggctctagtagacttcctcaatgcaggcttgccacaaaccttcaatttgtgaaaaaggcagtatgtgaagtgcaatatagcaaaggtatatgtaaggtacaccagtacatcaccatgatagacccaaactttataccaggcactaccgaaagagtaaaattagcacaacagttagcatagacaacatgacaacttttgtatggccatagtatagtttcagatattgttcacattctctgcaacaaaggaagttaagatacattacagaaaggagaatatgaaagcagtattagtaaaagggaatatcccaacaataggaaagcaccccatttggatatttacaaaaattctaaaaattatcttgtgaaaatgtgaaatccatattttaaaggtctttgaaacagagaaaaatagactaaaattttattaattaaagtaaatgttaactccaataaatgaggagaattagaatgcattaatgtgttttaaaattataaaactaaagtaatttggaaaaaaatgcgtatcgataatactcatttaagaaaacatggtcacgatttagtcaaatctcatcttttgtcccttgtttttgtttttaaaagttgtaataataattgacatttactcaacattttcatatattgagtaaaaccatataccaaacgaaaattgcatcctttatataagtagagaaattaggcttaaataaataacaagtgagaggccatggtgccaacctagtttgtcatttttcttttgaaaatcctaagttatttgttgtcaaaattatcaatattttatattttgttgctcttgcaaataaagcatttctaattaaagatcttagggcttcacatatccttcagatagctggtaaaatgctgctttttgctagaagccttctccgccctttctatataacagcaacctctcttctcagtttcttgtcatctccagtacaccttctggctgcttttctaattttatttttcccaagcacaacttagcactttactggaagtcatctgttttctgcttcacaaagcaaggacttgtctccgttgtgcccagctctagcctcagggcctagaaaagtactcagcgtgtaatgtgcaccaaatacatatatattggattaatatttaaatgcgtatatacttagctgtgaataaatagcatcaatatttgtcttttaaatgttaaaaatataaagtgtatagccttcaaaagtacactgtacataaacaatttgaaggtgatgaagaggaccctgaaacaggaatggattcctaattcctagcagggatttaatggccatcacggagcagccagatgttataagataaggatataagatgtgagaggcatggcaggtaggaatagggctaacatatattttacttaaaatttttgaattagctatattgaaaaaagtttaacacatgttaccacagcaaacactctaaaaactctactaagaattttggcttagaccaaggccaacgttgctctggacataaaatggccttttacacatgatgatgatctttttaaaaccaagtaagttaagtacattatttaaaagattttcatcctgttttacctgttatttcactactaaaggatttttctactctgagtttactttatcattcttttttcagaattttatctgtgcttattttaaataaacatgaaaattactaccatttaagataaatgtccttttatctttcaattatttttccagagcagtgctttaagtattcatataattatgagagtttctaaaattttacatattttataacagttcattctgtatgagttttcttttaatttttataagaaataccttgagagcagtgatacataatatattatgcaaaacctgaaaaaaatagtgatttccaacatcaaaggtcatttattcttctgagagcctagtgacctttaagttaatttcctattttatgtatttttataaattacttagtatgtgggttatgtgtacagaaagcacaccacgtaactttaaattgttctcaaatcattttgtaagtcatcagataagtagctacttaagtaatctatatatttgtaataaatatttgtgtagaaataatagaatgaggaagtcctttttcataactttgaataaaacactatttctccagttaaactggagggcaaataaaccttttaaaaatataacagaaaggtttgataagagcacaaagtgtgtattaagtaaatgttacaaaggataaatggaagtgaagtacctggattatccttactgagaattcaacacctataagtgaattataagtgcaatcacaactatcacaaactttgctccatctcattttggaattgtaacagcctcaagggcataataactttcaaaagacagtcactgagtgccaactatatgccagcccatatgctaggtatggactgctatgtttttttcttactaattagaatcacttaactgcttgaaaatgtgcattggtggtaaacctattatcagcccttactctatctttaaaattttaagttaaatttttgatttaatgtagaatcattttatacacacacacacacacacacacacgccacacaccaaaacttataactatttttcttgaaatatcaaaataccacaaaagcattatgattttgttttcctaaaatgttttagtgtaaatgacagttagatctgtagtctgattgccttaaaaagttgtttcatctctctgaacttgaattattattatttttttttgagatggagtctcgctctgtatcccaggctggaatgcaatagcacgatctcggctcactgccagctccacttcccaggttcacgccatcctcctgcctcagcctcctgagtagctgggactacaggcacccaccaccatgcccggctaattttttgtatttttagtagagacaggatttcaccatgttagtcaggatggtctcgatctcctgacccggtgatctaaccctcttggcctcccaaagtgctgggattacaggtgtaagcccgaaccctgaacttgtattttttaatctgtaaaatgacatgataatataatatgctgatcaaagtttgtttgcactcagatcaatttcctcagcagttttcttttattttttcactgtaacagaaatctgcatttcccatgcttccttgtcatctagtctttgggtagattcaggcaagggaaggcaaaaaccaaagattgaagggcaggaaaaggcaaggagaagggccacttctgtttttgtttgtttgttttctctgcttctaatgacacctacatcagagatcatatttctccctggtcccatttctcaccagcagtaattctactgtgaaatggctcattactggatctctggaactttagtttctcccattgaccttactatcatgaggaaaggattagttctctgctagtgctaatactttcatcactattccttgctttgtttcttagttattttcaccctgatgttacctgctccacataataaaatcagattgtttgtaagtcctagactagtttctgccttgctggctatatcctcaatgaagagcaaatatttacctcatgggagaaatagacgtaatggatttaggagtttagcagtttacagggcacaaattaaatctcaataaatatttactctgagtaaaaaagtacaaaatagaagtacaattcttttttattgtcattgatttcagagcaaaatgaatcaacagttgacaaattaaggattaacttatgcaagattattcaacaaatatttattattcatttgctctatgccagaaatgtgtcttcatgccaggttaagaaaaagagaaaacagaaaaaaaaaaaaatagctgtccctgactaaaagagcttatgttctttctttttgggagagaaaggcagtgaaaaattaaaaaatgaaacgcagtattaacatgcggataagttctagggtgaaatttgaatgcagatccagagtgactgtctgcctctcaaaagaattctgctgagatgtccagaagtaagtagagtagcaagcaaatatctacagcgcatgtctcttttaaagacagaaaaacaaagtggtttctaaggtgggtgaatcttggcatttccaagaaatatcaggaggctcttaaggatagaatgaccaaaacaatgagggctgtgataaaataaattgggggaggtatggagaaggatcccatattgttgctttcacaaacaatgacaaggtttggggttttactttgagaaggggaacaattagaaagctatgagcaagacagtgaaattatttgatttatgttttataattattctgactcctggctgaaaaacagcctctaggaatgaaagtgagagaaatagggtcatcacttatgaagctattccaatgatccagtgctttggcagttgcctggacatgtctagtaagaggtaaaagtaatctgatacatcttaaaggcaggtgttcatggatttgatatggcaaatgaaagaaagaagccactatgtgttatattccttgagccaaaattgaggtgtaaaataaacatgcccacataaatggttgattatgttcttaaatgaaggagaaaacagttgcagtgatgttaagtcatcaaccatttaaaatgttgcttttgaaagagatgaatcaaggaagggatggacatgaattttccttacctaaaaagctagtgaaaattaagagtgacatgaacaggattaaaactttattttatagtggtactgagatgaaacatcacactatctgacttcatagcttaaaaatataatcaccccaccaacttctcactcttttcaaggattttgtgagtaaccagctttaatttggaaaacctagacttctacatacagattgttatgtttgtgagtatgattatttctatcattttgttttacattgtgctttatcattcaataattaatatctatcattttccattaactaatttattttatgaccatttattattattattaccctatggtagtcaataattactgatacatattccattgttttttgggatttgatatagaatcagagaagtttgttgccaactcctttttagttgaatatatattgtttttgtcttatatttagtttttgtaaaacttcagattttccatcttgccccactatttatggctaaaaatcatatccaaatatgacaaggtttaggaacacacgcagttactgaacacatgttaaagtataataacacagaatacatttttgaaagtaagtttattaaaattagcaatatatttctagttatatgcataaggatataccaacatggattttgcctgcccaatattaattttctcttaatttctttcttacagaacttcaatttggtcatgagtctaagccccaaattatgtttgctgtcatgtactcatgacagctctttttcttgatttttctagcctttatccatttggaaatgtgaaccaccttttataggtgagatacaatatagctgaacccttctctaaaggtttctgtaaaaaagcataaatgtacaagcctatcatcctgattctatttagtttgccttgaatatgaatgtgataaatgaagtaagatctcacatcttgcaacatgaagtgggagaagggtcaacatagaagaaatgtcagaagaaatgaaccaatagaaaattcctcatttgctaaattttgttaaaagaaaaaatagattttaatattaatctgttctacacaggcaaatgttaactgcaatgaaaatgtcttttagataattcagaacactttccatccttggtaaaagtattcattttactgactcactattatatattttgttaagttagaaactcatattcaatcaaaggaaataaaagttccccctaatttctaggaatataaaaaataggtacacatagcttagataatattttctatgtttgtccaagtaaatcagtttagtaattgtttgaaatacttccaattgatatgagtccaattttagaaggaattttagttggaaatgttattctctttatgaagatgtaaatggctctgtttactggccaatatttacatacacatacagtcaatgaatgttaatttgcacacagtggcatatgtaattcaaagttcattttattagttaatttagatatggttcaatgagagttcaaactgagggcatagagtcatataacatactctagaagaacaacttctcatgaaaactaaaataaattgctttaccatgtttgcctttgtatttcactttttctgttctgaagaatgagcatggtaaaatttacatatatctaacgcatataatgggcaatgtatgaattattttacaaattactcataaccagaagagttctgttggattttaccatatggccagattcatcttgcctttcaaacttatgtaagtaatttttctgaatctctttttttcccataacatacatgctgctgagtccactcctccaaactaagtaaagataggaatgctcatggccaaatcataagtatagaaagtgacttttgaactgatgaagactttcttcttgtctatgctttagtcaggcttctaggagcactctttttgactctactttgtccttgggccctgtctttacactgcctagtccagctgttgcaagaatgctgctaagtcactttagagagaatctcccactcttgatatctgatcactctggcttgccgtcagcaagaatcctcttacgttagctaacaagaaatcccctacccttgatgtctcctcttagtaatttgtattcatcgacaacctttcactctgctcattagctgcacttcccagatatctttgctgtgttcagagttgaaccttatctctcttcctattagaatcatcttgacacctatcattttaatcttaaataaagtgatccttaaccattttaacaagtgttggaaatttttttattcagcagaactaacaaattgtttgcaaactattgaaatagaactattctattatggcctgcagatatttttctcaattataattcactttcatactgtaaaagtatctttgctttgtgtatatctttttcatacaaaaacttttaatttggcagggaacagtggctcatgcctgtaatcccagaactttcggagacccagacgagcggatcacctaggtcaggagttgagaccagcctggccaacatggcaaaaccccatctctactaaaactacaaaaattatccaggcatggttgtgggcacctgtattctcaggtacttgggagactgaggcagcagaatcgcttgaacccaggaagcagaggttgcagtgagccaagatcaggctgctgcactctggcctgagtgatagagtgagtgagactctgtctcaaaaaacaaaaaacaaaaaaacctttcgatttattttccagaggtctatttttaatttagtaacaagattttaaaaaatatttataaaattaaataacagtggaatgttagaactaggccctataaaatataaaattgtcaaaattggttagcatgattgtagcttcaatcatgctacagattgaatcaatctgtagttaacttcaatcagaagttaatgtggcaacttctgaaaccaaacatcatcatgcttggcatcaagagctaaagtagtcatgagttaatggagaagaacaactaaggaattggctgccaaagtaaagtttatgctaaatttaaatgaaatgaaataacaaagtagtttgaaatgaacattccattgattatttttaaaattttatttattaacaaagtagcttatactaactgcccactgtctatcccaatagttacagcaataacatatagttaacatttgtaattaaatatttcatttcatacaaatagtattttaaaattcaggtgttgatttttaagcctttgaatgtttggctgtttaaaatttaagtgcatataaaaattgtagaaaagggtcattattaataaaatattcaaaatatggtaaattatgcatgatgatttactatatgcaaattgataagtgatgtgaatagtacatttgaatagagaaaatatgtacataaatgaatggtatttcagaatctaagcaaattgatgactatattatgtacttgtccccagtgtaaaagaaatattaattagaaaactttttttttcactaaagggctgaacataaagtgtgatggcaaattggtgtgttcttgtatttcttgtctttaagaattcttttcagtatattttcacttaatgtcttagcaatatttttcatcatacttttacacttatagctggactatgcttagtgatagaaaatagttatataatgggattatacttggccatatgaatttgatggtatgaattaatctgtgtttcatcttacttgtgtctacttgtaagtcattgatgctaatgttattagtaatttttatagggtagaaatgttttctatatgacatttttgagaaaaggaagtcaataaatcccatttgatatgcaacagaaataaagatctcttatttcaattttaaaatgctttataacttacattgctttgttttatgcattatttgttttgatcagatgcaaaatgagtcagtaatgtcatctaaccacaagtttgatacattttttaaagaaaaatttccaaaatactataactgagcaataggttaatacttcataaattaaaatatttaaatattcaatctttctgagtggatatttgctgcatatctcataacttggcctaattctgtaattgggatgagaactacccaattttattggtaacctcttttctgctctgcaactttggaaatactatggaggactccaaattcatttgagacaaaaatattaaaaatgtaacccccgattaggatttcagttccaaagctctccttggagggatatagagctggagaaaatcacatttattttttgtctccttaatattgatatataaaatcaggttaaaattagtatcaaaatgggaagcctgcattgtaaaccggctggaataatacactctgcaatatgaaggaaaaaggaaaaatttagttgatttatttacctagctataattttttaaagaattttaagtttctaataaatttaactataaatttttaattttctatctttcatttagtaccatctatataaacttttccaggctacttctctgaatcacctggcaaaatcttataatttaccacctaattgaataaaacacacacacacaaaataatctattttgaataataaacattatttgtaattatattgttgagattgagagtaatcatcaggtgtggaaaaacaaggaaattttaacaatttaaaatgtaataatcttttttgtattatgtgtgctttatactcagaagtgcatatgttttataaaagtatgtgaatttataaatgtggtcaatattaatattaaattgtatcttttaatagtatcttcaattatcttttttttgctgctggattccatttagaaaaaaaaatgttctatatagcagtgttgctttctttttcttttctttttgcttttctttcttttttctactgataaagtatttacttgatcttggggaagaggtatataatcaagtgaccacatttttctttgttacatattattcaaaatttataatcaatctttccaaattgtaatcggtctgaaacccatttgctttactcaaattatttagtgactgtaaaagtttcagaaacatatgaaagttacaaattagctttaaatgtgtcatgtttaaagcagttgttttaaaagctaagtcattatccattattatgtaactagtattctaaatatcacatctttgcattgtttgacttttaaggcatatgaaatgttttgggtcagagaaatcatttgcttcacatgcctaagagacagactctatgggtactgagtcatgctaatagtggcaaaacctgacaaacaataagcatcattttcaaatattttaaacatttcacataaaaatttacttttagcatacattgcagccatcaaggaagcctaaagtaaggaaaacctcagtgaaatatgatgaagttaataaaaagaaatagccatcattttatttgtttaaattgccactacctctcatataattatgtacaatatataacataggataattaagtcaaactgtgtacctacagatatggagagccttttgttttaggaaaaagtaaaatgtaaattaactggtaaagatgagcttttcaatctataaggcatagacacttttccttagtggatttgaaaaggttgttataaatctgaaaataagatagtttttctataataaatggtaaaaaacactttcacatcttaaccttatcatagtatcacaatgctggaatgtttatactaggaaataagtaagctaattcaattataaatttcagtagaggaaaggatgaaggttaaaaaacactatctattcaaatccttagtcatgaggttgaattcattgaatcagagtgtgaatatatatctatatttgagacagaatgtgtatgtatgtgtgtgagtgtgattgtgtgtgtacagtcattagatatttgcctcatggacagtggaggaaaacatttgctgagctgctttcctaccttaaagatttagaactgcactgttttcaagatatactttttatatctcaaataatttaatatgttatgtttagttgttgatataacaagatatctgaataccccataattgaaattatacctggaaataaatacttgaaatacttgcttcagtgacatttgtggaagtatacatatttaagttcaaattataggtatattgaacaaaatgatattggattcttcactgggtgcatacttctgaaacttgtaaataatttgaaattagtttccaagaacagaaagacaaatattagataggaaataccaaattcttaagattcatacatataaaagtgaaataaaaatcaaacttaatcttatcatgaattttcaactgtggcttaattttagaacttgttataaaaatagaaatgctattaatttaattatatttattaaaatctaaaaataggtgattatagctaggacattgacaagtgtaactatatgtgagtaaatataactgaggatagcaaaacatgaaatatatcataaaaattgaattattctataaatagtattatgtctggattacttagaacttgattccacttagaatgtccctgcttttatttatttatttatttttgtaaacaaaatgagcaagaggttattacacttcattcactgcgaaaaggtaacactacatcaaagataactcacatacttgcagaaatatggaaggtatttctttcttttttttgttaagaaatagggtctcactatgtggcccaggttgtagtgcagtgactattcaaaggggtcatcccactactgataagcagaggagttttattctgctcaatttttgagttgaccactccttaggaaacctggtggtcctctgctccctggaagctaacatattgatgccaaacttagtgcagacacttcatcagcatagtgcatacaacccagaactcctgggctcaagtgttcctcccgcctcagcatcctgagtagctgggacaacaggtgtgtgtcacctggctgaaaggtatttttaaatacaaatgttgtccaggagtgacagaagctggagaattgcactacttgatggaggctttgtacaagctttgaacaataataacaacaaaattgaaacgccaaaagtgttgtttaattagcagttaaccaccaataaaaggaagccagccatttcacacagaggattttggtaattgattgtgtgattcaaggaaataatattattaggtgtgtattagtccattattgcattgctataaagaaatacctgagattgggtaatttataaagaaaagaggtctaactgactcacagttctgcatgctgtacagaaagaatgttgcatctgccgggcatctggggaggcctcatgaaatgtataaccatggtgggaaaatgaagagggagctggtgcttcatatagctgggagcaggaagaaaagtgagaggtggggaggtgctacacccttttaacaaccagatttcctaataactcactcactcactatcataagaatagcaccaaggaaatggtattaaaccattaaaaagaaaccactccacaatccaataacctcccatcaggccccacctccaacactgggtattacaatttgacatgagatttggttggggacatagatccaaaccatattattttgccctagtccctcccaaattttatgtctttctcagtttgcaaaatataatcatgccttcccatcagtcccccaaagtcttaactcacttcagcattaactcaaacatccaaagtctaaagtcttatctgagatgaggcaagccccttctgcctaagaccctgtaaaattaaaataaaaaaaaactcccaagatataatgtataatgggggtacagggattgggtaaatactcccatttcaaaagggagaaattggccaaaagtaaggggctacgggccccatgcaagtctgaaacccagtaggaaagttattaagtcttaaagcttaacaatctcctttgatgccatccagggcataccactgcaaggattgagctcccaaagccttgtgctgctccactcctgtgactttgcagggttcagctcctacagctgctctcaagggctggtgttgagtgcttgcaccagttccaggcacacggtacaagtgctggtggatctaccattctggggtctggaagatagtgtccgtcttctcatagctcccctagatagttgtccagtagggacactgtgtggtggctccaaccccacctttcccctcttcagtgccctcatagagattctccatcagggctctgaccctgcagcagatttctgattgtacatctacgtttgttcatacattctctgaaatctagtctcaactcttgtactctgtgcaccctcaggcttaatgccacatggaagccatcaagacttatggcttgaaccctctggagcagcatcctgaactgtacctgggccacttggagccatggctagagctgcaacagatgagatgcatgtagtagtgtcccattcttccttcgttgtcctctgagcctgtgatgggaggagctgccacaaaggtctctgaaatgccctggagggtatccctcattttcttggctatcagcatttgccttccttttagttaagcaagtttctgcagcttgcttgaatttctttcctgaaaatgggctttttgttctaccacatggccaggctgcaaatttttcaagtttctacactctgcttcccttctaaatataagtttcagtttgaggtcatttctttgctcacacacatcaaaatagtttgttagaagtagtgagattacctcctgaatgctttgctgcttagaaattttttccaccagatacccaccagaacttgagatactctcaagttcaaaattccacagatccctagggcaggcgcacagtgcagccaacctttttgctaatgcctaactaaagtgacctttgctccagttcccattaagttccttatctccatctgagacctcctcagcctggacttcattgtgtgtctctatcagtagcttggtcacaacaatgtaacaagactctagtaagttcaaaacttgccctcatcttcctgtcttcttctgatatctccaaacccttccaatctctgcccactatccagtttcaaagccactttcacattttccggtatgtttacaacaatatcatattcctctaccaattttctatattagtcctttcttacattgctctaaagaaatacctgagactgggtaatttataaagaaaagcagtttaattggctcatggttctgcacgttatacagaaagcatgatgcatctgctgggcttctgcaggggcctcagtaagctaacaatcatggcagaaggtgaagggggagccagcacttcacatggctggaagcaggaagaagagtgagaggtggggaggtgctatacacttttaacaaccagactcacaataactcactcactgtcacaagaacagctccaaggagatggtgctaaaccatttaagagaaactgcccgatgatccaattgcctcccaacaggccccacctccaacagtgggacttacagtttgacatgagatttgggtggggacacagatccaaatgatatcaatgtgttaaaaggaaaaggagatagcagtgggaaatggatatttaacttcagtttatgagtttttattttagagttctaaaattatgtcttatactgcctatacaagtgctagaatagtttctgtattaagtggtagatattaatatccaaatatcatacttaccttctttgaccttgcagtttagagggcattttaataaagtaaacaaacacattgattttttttaaaggagacatttttcagtaaaggatgtaactatgttaacatgagagatatagaaaaattacagatggacagacaatcctacatagaaacctaaggaagcatttaactcagacacagagattgagaagagtaaagtgggtgaaatctgggaaagagtgcttccagtagaagaaacagaatattgaaggaacagagattgatgtcaagagttcagggaaacaaaccagaataagaatgtttagacaaaaggctgatggtagaaggatattgagactgaaagttatagagagcacaggcttactcgaaaattagcagacaaaagaacatctgtaagttcaatcatgaaggagtgccagaattaaagagaaaataaggaaataataaagggaatcttttgatgtgaggaaccaattgggctaccaactcagcctgccagcctgccattccagtgacagtagaaaataaatgttctgtaagttatttggaaattagaggacaaagtaattgtttgttctataggtagagaaacatttttgtaaatgataatacagctgttctaccgatttctcttaattttcaaaatttttgaaggggtacactatattttcatgatttcttcattctgatttccaactcatatttgttcatcattttctctttactttttaaaaagttgaaagacattcatatcacaaaattttcacaggataatttttctagttgcaactgtagatttatgtggatatatacaaatctctctagtgacacatctaaagattaatgttatgttctattccatagggagcaaatataccacatgaaacattgcaactatgaatctaactagactgtatgggaaacatatattgaaaaataaattaaaattataagttctatgagaaaacacaaacatttgagtaaaaaaatgagaaagttttagtggtgccttcttcccatgtcagaaaaaaggattcataatgaacaacttttttttcatgtatttcctacaattgagtaaaataataggactaggtaagtttactggtttgcattttttcatctgggtctggtttttcatttcaattgttagccattgtattaactactttcaccattcaaaggaatgaatgatctgccatagtattttctgcagttccatctcttgttttcagtatcattccaattctgcatctatctaattttgatctctgttctatttattttcctgattcataacattttgctttgtgctgagctcctaattgtctctctgtcattctcaacattttagccctatggtctaaaagatgcccaaaagaatgtagcatattctagtatatcagtgggacaacataaacaacttgcttaattgttaatctatttaaaaatgaaacagtgtttttcattttttcaatcaatttaacgctgactagatcctataactacattctactttttataactaaagaactccagaaaaataaatgtaatagctttgctggaaaagattaactttacaatgccttcctaatgaccttactttttttttttttttgaaaagtgttttctggtatacaaaaataatattctgaaatatctctctgatatttgattgccagatttaacctacatacctctgaaccttggtttttcagacatgcaaactgcttaacaagttccagtgcattaatcaatgcaccattgcataacttagagtaagaaaagttggtagatatttcagcaatgccataaaatatgcttccatttaacactttgagacaaccaatacactatttatattattgagacaaaacaaacctaagatcacagaaaaatatttattttactagaatggtatttaagtagatagtttttttgttgtgtttttgtttgtttgtttgtttttgagatggagtctccctctgtcgcccaggttggagttcagtggcccagtcttggctcactgtaacctccccttcccaagttcaagcagttctccctgcctcagcctcctgagtagctgaaattacaggcatgcaccaccatgcctgtttaatttttgtgtttttagtaaagatgggatgtcattatgttggccaggctcgtcttgaactcctgacctcaggtgatctgcccaccttggcctcccaaagtgtaagtagatagtctaaatgattatgggtttcaataggttttattaatttgttttagttaacatacaagagcactacaaaaccacattattttattttaatttttatcaataaacttcattatattaaaggccatattgcccactgaatatgattttgataagcacaacttctataatttacaacttactgtatatggtctaatataaattgcatttagctatcctgaataaaagatacgaatccccaaaaacttaatatataaaataatttctacaatcaattaagccacatgggacctggtgtgcaagggctgcaaacagcagcatcctaggtagtgtacagcagcctgttccttgtgtacaacagcctttgccattggacatttatgtcttggatctagtgctttccctagtctaggtttaagactggatgtagtatgcctttggaaagcctcaggacccagaggtcagagttcacgttggccatgttcatccataccaagctgcaaaccctggagcatgtgattgaggccttatttagggccaaattcaagttcagtgaatgcccaaaaagccacatctcaaagaagtgcgattttactaagtttaatgcatatacattttaagacttggtggctgagaaacaactcatcctggatggctgtggggccaaatatagccctggaatcatgggcccctggacaagcagctagccctgcattagaaaagagctgccccctctttacacatgcccaccagtgaattttatttcctgtacatctaataaatctatctatctatcatctatctatctatctatctatctatctatctatctatctatcatctatctaaataattcaataatatgaagtagattaaaaaaacaaacacaacttgatgtctaactactgtggatatattttgtcagttattaacattcccctttcaggttaatatcaagtcaacaaaaatttggagttctcttgaccctttccccaatgtgtaaattagtaatataatgtcaatattcagataggcaaataaactaagctccctttgatgaaaacgacatgcagtaacgattccctgctgagagtcatcttagtttgtgaaatcataatctggaatgggtatatctgcaaaatacattaaaagaaagaaaatatgaaaaacataatctacaatacttttatgtatatctaatcattttatatttcttttttattatactacttgaaatacatacataaaggataaagagtttcaacaaatctcaaaaaggaaacctaattatgtataataatctgactgattttgtttgctcaccaaattgaaattgaaaagaaaaaatacagcactctataaaaaaacaaaatgatttcaaaatataattattgtctccctttgaaaatataaatgtttaaataatggtgaaatagagaacataaacattcacaaatattacatatccattcaacattttcaggtattattttgttttgttcaaacctccccttctgtcatttttctctcctttctttatctttagcataactgagctgctttccaaacatctatagttataccggacatagcattttccaacatcaaacatggtttttcttaaacaccagctccaaatattaattcccagggaaaatgacattttccatatatgagaaatattggaaccaatataacaaaactcattaacatttataacatttgaaaataatttcacaaaagttttatttaaaaaaattatattgtaaatttatgtaagaaattctctatccattatatgacttgtataacatccacagtatactaagaaaatatttttaaaatataggataaggtgtctaaataataaatttttaagactgcttagagccactattaaaaatctgagaataaggcatgaatattttttgatctatagagattatatatcagcatgccggcattggcttttattatagaataagcattttaatcttcattaactttcatcaattcactatagaaagcagcttaaaaaaaaagaccatcacttttagaaaacagttaatatttcgatggtttacctggaagtttactgggcataaatttataaaatacatttatggatggaaataaactgttttactaaacaatattacagaattctgaatggatgctgattaagcagcaaataaacaaaactgtttatttaccagtttggtggctgttatgctaattagatcatctgtttaaaatgtgtccatatggacaatttttctgtaaatgttttctttatctccacattgtgtggtagtattttcataggaccaactagaaattaacttaaaaattagttatttaaagatgacaatagaaggttttgaactttgagttccaaaaggcaagcaaatacttctgaaataaaatatattatatatatttaatttctaatttaatttacatataaaatatttttaaaattcatatgaatttgagatattttcacattgattggactgtttttgtacctcattttgcttggtcacactaaagtgagattcatcatcttgtggcaccaaaggaaaactagtgtgattataaggaaattattatagttagacaactgtgcattaatttcatcattaaggaccaaacatgtatacagatataaatacttttcttaatacattacttgcaacatatgcacaattatgtaacaatgatggtgaactaagtctcctagaaatttccaaaataatttttttgcctttttttaacctctaaatccatataaatcaagggaaaatattcttgcacatatgtatatttaaacatgaacctagccaaaagtaagagaaatttaaaaaagtataacatatcaaaatgtggaaatttctgtgtttagggaaaaatctatcccattaagagcttgcattagaaaagaaaaattaccttgaaattatgatgaaagcttcccacttgttattataaaaatgagaacaaattaattctgaagcaatcagaaagaagaaaataataaaggttaatgaagaaataaacaacattaaacagagaaaaattatatagctaagtaaattaaactaaatttagatctttgaaggatcaataaaattgttaaatctctggccagactaaggagaaaataataggaaataaataattgacaaattttaagaatgatagaagtggctgggggtggtggctcatgcctgtaatgccagcactttgggaggccgaggcaggcggatcgtttgaggtcaggagttccagaccagcctggccaacatagtgaaaccctgtctctactaaaaatacaaaaattagcagagcgtgatggcgcatgcttgtattcccagctactcgggaggctgaggcacaagaattgcttgaagctgagaggtggaatttgcagtgagtagagatcaggccactgcactcaagcccgggcgacagaacgggactctgtctcaaaacaaataaacaaaaaaaaaagaatgatagaagtaacatttccattgtcctacaacagtttaaggataactaaatgaataccatgatgaaatttataaatgtaaattagttaatttagattaagtgtataaatccctcaaaagatacaaacgactaaggcaagctcaaaaagaaagcaataacatgaacatccctatatatatgttttaaatttattaatacccacctagataaatgaactgacaaattttactaatatttaaggagatataatttatactttacacaaaagtttaagaaataaaaaagaggaaacacttttcaacatgttttatgagtctaccattatccccataccaaaaccataaaaaagacattacaagaaaatgtcctgtagacaaatatgtatttagatgatgaatttaaatttcaaaaacttcagcaaaatattatccaattaaatcctctcatgtctgtgtgtgtatgtgtgtgcatgcacgtgtgtttgtaaaatatatcattactaattggcatttatcttgggagttcaagatggtttccatattcaatctacccatcaatgtggactatggtcacttgaaaagaccagcaaatcctctacaaaaaggccactagaaattcattaaaacagccttccatcactcttgaaattgaccaaagcattcaactacctgagaaatatttatgtttggaaagctattgaaatgcaattaaaaatatcaggaaacctgtttttaccttttgtcctaatcttgctaaatccttcttaattttatgagacactgcttctccttccactgttcttttactttctccttcccctttgtttttgcctccccattcctctcccttttctacattccttctctctcctaaatgctgtataaatttctacatatataatcatattatttacaaataggaacagttttacttatttctttccagtctgcatttattttattcttcctttttttccttacgcactggatagaactctaagtattatgttgaaaaagagtgataaaagcaaacatctttgctttattcctgagcatacatgtggaaaacattcagtgtttcacagctaaatatgatggattttttgtatgctctttatcaagatgaaggaattttctgctatttctggtttgctgaatttttatcagaagtaactgttgaatagtgtctttttcccctgcatttattgaaatgatcatgcattttcctattttagaatattaatatgatgaattatattattagattttttaaaatattgcaactgtcttgcatttctggaataaacatggcttggtcatgtgtcacttttttacatagtgtcatattcaagttgttgaggattttgcatctagggtatatttgtagatctgcatctaggttatgttggtctaaagttttgtttgtttgtttgttttccttttcttttttttatcatctttgtcttctgtttaagtgtcatgcttgcttcataaaatgaattgagaagcatttcttcctcttctgtttctcgaaaattttagagaactcttgttttttgttgttgtttgtttgttgttttgttttttcttatttttatcctcatactgagaaccaaacagtctggagtgtaaaacatggttcctcattccagttaaatctagtacacaatgacaacaaccatcttgggttaagcattggcctacaaacagaaaaaaaccttcagggagatagatgctgatctaggcattgtgagaaaagctgaattcatttttaatcatgaatggcttttatggaaagaagatttattaactaaaataaatagattagagggaattctcatctatgagagaggaagggatgggattcaacctggaaaaaatgatgaagttttagtgaacttggtaaggtagactcaacaattaatgatggataatgctaggacccaacactggtaatgagcttgtattatgactgaatagcatcactttatcactttaacgcagatggaggcctaaataaccatagggcaatggttcttcttagatgcagaaggacacatttatataatcttagggaccccatctctgaggtcactcataatttatattaattcattgttattgccattgccccaagaatagataaggctaagacatcccgtagtacaggtagcagagatataaactattcttattcttgtgtcttgtctataggaagggagtgtatcctggtgtatgacagcatatagtagagaccactgtcaattagggcctgtgaactgagacagggtgactggctaagtccacaacccattagaaacccagaaataatcaaatcatggtgagtagtaataacacttatttataatactatacggtataaagacaagaaccaattatgttgagtagctgtaacaaatagctctatcattcataataactttttctgtaataaaactgaattgtaacatgatcatactgcaatatgacattacactagcattgttggtaagattcaactatcttatgtagagaagttatataatgcttatattgataatcaaatgtattagatattgagttaaagcctcttcagaatgtaatctgggtgaataataaatggcctgagaaaacagaatttagctaaccattatctaatttcaatgctaaatagttctgcacagatttatcaaaaagtaaaaataaaagcagattgagaggaagaatgagtaatttcatttgtacaaaatattaaagtgtatgtaatggccttgtaggatgcattagtaatttttaaaaatcaatctttaccctacactgtgtccataaaatgctaggcatattcatgttaatattactgttgttactgtcatataaatgccatattcaatgtagatgctcagaaaaatatgattgttttgctacaggagagattagaccagggacaataaatatggattaggcaagaatgtgttaactcagcaggccagggtttcttcaaccctgcacattcaaaggtaaggtttgtttttaggactagctagcctctgagttctggaaatagtcttaccgtgaagagtgtttttgtatatctgaggccttgggtttatggtgaacgactgactttatatgcctgaggccctgagccatgctgtatttatttgaaccatgtggtatcaatttaaccagataacgtttattctaagatatgatttatgctgaatgcctggttttgttctagagggatcatggaaaggaagctgaatttgccgagttttgccacgtgggcattgcatgcctatgtgattaaccaccaataaaaacctgggacatcaaataataaataagctgctctaattgccaagaattcacatgtggttgtatgcagcattactgggagattgaagtgtatctgcatgtgattctactgtgatggacacttgtaagtttgtgcctggagtctcctggactttgccctgagaatctttttcctttgttgatatgactctgcatccttttgttttaataaactgtaaacatgagtataattgcttctctgagttctgagagttttttaaataaataatcaaagctgaagagcaatggaaacccccaccaaaacatctttaaacatttcaattttgtattgaagtaaattttattttcttttttatacctcccatatatattctatttttccattatttattttatccaaaatcttttatctgtgatcattttcctttgaaatttgtcttttgagatttctttagaaggtgcttttggatgataaattttctgttattctttgtctaaaatgtcattattttgactcatttataaaaggagtttttgtgtttcataaacctctaatgtatagaagtgtgtctaaactcattgaggatattttccaaattttttcctactttttattgctgttgataagaagtcagtgttggtattttgacatttaagttatgtgtcattttgttgtggtagttctgaagatcttccctctgttttatattctccttcacctttcataaatgtactttatatttatttggtaataaattttgaacatatactatgctataaagataatctaggccctttggttacgtcttgtaaataaaatcaacaaaatctgttttgagattatattgtaatataagatacccaaagtaaataggatgtgtaccatatgtttgaaggtggtaaatacgatgagaaaaatagatcaggtcaggaagaatgaagatgattgaaggtacggttatgataaaaacttaggtgtgccgaggaatgaattcatcttatgtatcttgagtgtaatgtcttatttctcctgaatctgagaatttgatgtctttcattagggatgtcagtaaatctcactaatgaatatattagactccagtttaatatatgatagtcattttcattctgtctttcatatcactgaatcctttctctttattgttcatttttatacatctcttaatagtcacagtgaatttaactatgttttacgttatgtggttattctcactttagctatctctaatatatcatgaatgtgtcagttgtgtgtttactattgtttgaattaaacttttaaatcattcgttttaattcttacttaattcaaacttgtttgttatacattcttataattccagtatctggagtttttcttcatgtgattcttttatctccctgttttcctcctatattcttttcatgcaccatctttctctgtgtgttttgttttgttttactgtcaattcctaactaatggaagtatatttatgcaaataattttaggatagaatttaaatagggttcccaaaaggattatataaatttttttgtaccaagggcccagggttataaacagaatgagatcactttaaatttctgtcttgaggattttcaagttacacaggtcgtattagtgagaaccccagaaaagggcattctttttttttttatatttcactttacgtcctggaatacatgtgcagaacgtacaggtttgttaaataggtatacatgtgccgtggttgtttgctgcacctatcaacccgtcatctaggttttaagccccacttgcaggtatttgtcttaatgctctccctccccttgccctccacccccaacagttcccagtgtgtaatgttcctctccccatgtccatgtgcagaacctgcagttttgttacataggtatacatgtgccatggtggtttgcttcacccttcaactcgtcacctacattaggtatttctcctaatgttatccttcccctaggcccccaccccctacagcccctccctgatgatcccctccctgtgaccatgtgttctcattgttcaactcccacttatgaaaacatgtggtgtttggttttctgttcctgtgttagtctgctgagagtgatggcttccagcttcatccatgtccctgcaaaggacacagactcgtccttttttatggctgcatagtattccatggtgtatatgtgccacattttccttatccagtctatcattgatggacatttgggttggttccaagtctttgctattgtaaatagtgctgcaataaacatacgtgtgcctgtgtctttagagtagaataatttataatcctttgagtatatacccagtaataagattgctggctcaaatggtatttctagttctagatccttgaggaatcaccatactgtcttccacaatggttgaactaatttacactcccaccaatagtgtaagagtgttctcttactacacttccaatttggctggactttgagctttgtctctggtcccctgttttttacagtcccaagaaacatggcctcatccttatcaggaccagagaatgctctcaaggtaaaaccttaattttcataaaattgttgtcttcttgcctgatcattgtgacactaaagcaagatttttttaatgtttcatccaacttttaagaattattttagtggtaggactgagccaggtttctaatccacactactgcagataaaaaaatgacaaaaggtaactttcaaaaatagaggccgggcgtggtggctcacgcctgtaatcccagcactttgggaggccaagggggttagatcaccgggtcaggaaattgagactctcctggctaacacggtgaaaccccgcctctactaaaaatacaaaaaaaattagccggacgtggtgtcgggtgcctgtagtcccagctacttgggaggctgaggcaggagaatggtgtgaacccacaaggtggagcttgcagtgagccgagatcgcgccacaggactccagcctgggcgacagagagagactccatctcaaaaaaaaaaaaaaaatagaaattcgtctttttccatgaaagatttattatacattctaaataaaatggagatagaaagttagcatttgaactttaaagttgttagcataaggagcaatgaaaactaaatttcccctgggagttactcatttttctgggttacaaatgaatgccatattattttttgatgtttaatgtaaaatattattgactgtaataatccaatatgatctaggatattcagtcttacacaacatagggatacagtataggttgatgtacatctgaaattataacacactttgttcaaacacaatgcatattacattttcctgtagctcaaatctgtgttatctgtattattaagagatataaagagaggattcaaaataatagctgaagaattctcactaattttatgaatctagtagatcaaaatgttactctaacattaataatttcataatacagactgtgaggcttatataaatctgtttcaaaaaatgtatagcattctttagctttcatgttgtaagacattcagaatataatccaaaataaagttgtaataaattatcgcattttaatgagtattttaacataaaatgtgagcttgggattattataaatctaaagacacataaactcagtttctaaaagatatgattgaggggaaatcatgatttattatatcttcattttatcaagaaaagacacagttattatttataataaaaatgattacaatgcacacatactcttttgtgagttgccacagaattttctattaccgaaacctgtcaagttcaacccatgtctagaatatgtgtaaataaaggttgatctgtgatattagatattatcaaataaaaaatattcttattgaaaaaaatgtgattccttatgacaacttcagggcatcttctatttgccccctgttatcaacaggggaaattttctttcctacatttctcactaatcatttctgacaagtagttggcaagcttaactataaagggttgtccatagggttctaggtcaatcttaccctttggaaagaaagtatacatgatgtctatgaataaatgccctccaacaaaggaaaaggacaatgctttacatagtgtgtgcataatcatttttcaacataattagcttacctatttgtgacatgattttactgtcattgcaggtgtttgacatgacccacttttttctttgtgccaagaaatacaatggatttgtattacattaatactttagatcatctataatatgagtcaggtttggttaaaaaatatataaaaataaaaatctcagttctattcgaaatactaatgaaagtatcttaccaaagtaagacattagcaatgcattttctgttacttgatattttgtgtgtttgctcatttcaacaagggaaagggaattagaaaattggaagaaaaatatttaagtaagtcttgtaaaattaatatacatattaaatatcatgaagtgtagaaacagagttaacatttaaaatgtttataactaatatgtaaatttaattgaaagccaactgattgctctgaatttttatgaggaataatcgcaattgtacagaaaataactgacaccaaaagtatctacattttcacatttaaatgcaagtgactttttgttcattcattcaaaaattatggattattatactttagcttaaatgtttgtctcccctctaaaagccattttgaaacttaatcctcaatgcaatagtattaagaagtcaggcctttaggagtaattaggccatgaggactctgtactcatagatgggattagtgcattacaaaagggctgaagggaactagctaatgtaaggacacaacattcaagttaccattttagaagcagaaactgggacctcacttggtgccaaaactgccagaaccatggttttgaacttttcagcctcctggactgtgagaaacaagtttctgttcttatcagtctcagctattttgttacagaagcacaagcgaactgagacctgagatgggaatgtttatgtgctaggtatggagctaatttctgaataaataaagatgaatacattctatgacctcatcatctagtgcctgttacagtgacacagtggatattttttcttgccttcttattactcatttttgctctcctcactaaatattgaggaaaacatgaatgcatcatcagtttttccactgatacaactgtttaagaagtacatatgacattatattttttctttctgtattctgtagacttacctgtaaagtctaaggctaacattgactttatgctaattagtactgtgttcatttcagatgtgtaatatgccttgtacaaatataaatagataaaacattaaaggtgctactactcaaaacacacagggaataaaatattctatttgaaacatcaacatagagtttacaatgatggaaatttttattcattagtttaaatggggcaaaatacaataaatattatttggttaaaatagagaaagttaagtggaaagatgaaatgatgaagagcccagagaaaactgttcagtttgaatacaaattgggaaattaacacctaacctgcctaggtagaatttcatagcattaactaaaataattacttaaacttacaagatttattagaaaaatatgaatagaaaaataaaatgcattgttgcattttatgtaattttacttgaacttagttgataacatgtacatagattaagttgatttaaatattttatgtacaaaaaactatattgttgaagattctaagagcttaaaactaaaatacaagataaacatttactttacaaaaagagtaaataagatgaagaatttgaaagaatttaagaattaatttcagtttcttttccaaaatgtatgtggttagcttacaatgcttttacaatctgttattttatgagtatgaatattgattttattattacctaaacatgtattatttttaaaatatggcaaaagaattaaagttctatagtttgacaaagctgtaaagcggatcaatcctttgacagcttaatgaataaagcatgcatgtagttgacactaattcatttaataaacatttgtagaacatatatgtgtaagaaactgtgcaaaggagatgaatggcacattaaaacaagaagacaagtttccagatactaaggagtttatgtaactgtaaggtacataaaacaatacaaatgaaaaggctaaaataaatcagaaaatgaagggaagaaaacaaatatccatattaagtatacataatatctcaaatattctttaagatgtcttaaatagattttaatatttaatcctagtgacaggataatctgatttattacagatgatataattgaggctaatacaaatctgttgactttaaattttcaaagtcttcctgaattatttgactgtataatattttggtaaacataaataagtggatactaatgcattgaaacagaaacagaatactgttcaagaaatagaaaaaaatgaaacaatagaaaagatcgaatttgtagtatgactacaatttaagatttaataaagacaaaaatagaaaccaatatgtagttaggaggatagaaaaaagtacagtggaccctccatatccataggttctgcatgtgtggattcaaccacccatggatcaaaaatatttggaaaaacatttatgaaaaagtgaacacatatggaattctgccttgtcattatcccctaaagaacacactataactacctacatagcatttacattgtacttggtatcataagaaatctagagatgatttaaagtatgtgacagtgtggatgtaggtgtataaaatactattatacatcattttatggaagggtcttgagcatctgtagattgttttgtctgagggttcctagaaccagtaccccacaaatacagaggaacaactgtaatgagttcctagtaaactaggctgaagtattataactgtacacaaaataatttaaggcagaatgattaaataatatatagcagtatgtataagaagtgaagataattgaaaattaaattgataggaaagacatgacaaatataatgaaatcaatggaaaagttaaaactttagcaagatgtacaagcaaggattgggtagatttcatccgaaagacataatttctaatgacaaagtactttaatagtctagcctaatattttattgtatcttaaaacttccctctggctcattctggtctgatcacaccagctttcttatggcttcttttatctgccaagaattatgctctggtctaattgacctccccaaatttgtatattaaaattctcaccaccaaggtgataatattaaaaaatgggcaatttggtaggtgactggatcatgggagtggagcccttatgaaaggtgccagagagacccctccctcttccaccatgtgaggttagactgagaaatacatctctgtggtttataagctgctcagtctatggcattttgttatagcagcccatgctaatgaatacagatgaccgtgagtctgcagaccttcctaggaaattattgagtccttcattgaatactaaactgtgaatacatgagagaaaataactgaagcctggggtaaaatgccaacacaaagtgtttgaagaacaattctcaaagctcagaaagctctgcaaatattattgttgccacaaaccaaagtagaagacagggtaatatatgagctattaggtagaatctttggaagaatcctgcttttgtgatggaactcactcattcctaaacctaaagcaactctacatcttctctaagaaaattttatagcaatctctaaaagcatcaaactgattccaaataatttaactgtgtttgagaacaaaatacaaatatacaaaaggaattcaacaaaatccgtcacataacaatatagaattcacaatatctggttttgatgaacataataattagtgttgaaacatgttaattcaggtgttaaaaatatgctttattttttcaaataagatgggaaaatatgtatattgtgagaaaataaaaatggaagaaataaaaacaagcagactcctaaaacagaaaaaataagtatattagattaaaaatgtatgaataaatttaacagcactttaaccattgtagaaaaaataccagtgattttgataatataacaatataaactatccaaaacagaaaacatagacacatttgaaaaaacaaccacactgtgttggacaatatcaagcagcataatacaagaagagatggagtcccagaagaacactgagtggatgtatgtgtgtgagtatgtggtagggaagaacaaaaccaaaaattcaaagaaatgattgccaaaatgttattagaatcacaaataaagacaaaatggcaaggtaaactattgtctaatttctgaaaatcagtgataaagtgaaaaatcttaaaaggcatcagagatgaaaaaataatccacatcaaaagaaatacacacacacacacacacacacacaaatatgggtaactttcttcagaaactatgaaagcttggagacaatggagcaatcataaataactaaataagaaaaaacagctttatctacatttttataacaagtagaaaattttaagcactaaagtaaaatagggttcgtttatttttagaaaattaaaaataggtttggaactagggtaaagtaaatgacacaactaggtccgaaaacctaaagagctactcactttcagagttatatatttgagatcgagagtgcaaaacttgtgtcttgtgtgacccgagagagtgcctcattaagtttttcaccagaggtaatttgctcatctcaacgttgtctcagcactgaacaaaatctaaagaatttcattgtcagccatcctccattgtcatttataagaaagattcctaaggcagaagtaaaattttatgagatgtatatgtgtgtctgcagaaaaaaactggcaatgtattatactgcatatcaagtgatatactattatttgaaagtaggctgtgaagagttaagtatttatattttaaaacttaaagtagaagttttatattttaaaccttaaaacagaagtatttatattttaaaccttaaagcagaacctataaaagaagtacattagtaaaccaatagtagaaataacataaaataatgaagtacatatttaactaatctacaaaatgtaaaaaaaggataaataattgaacaaggagcatataagataaatagaaaacatagcaagaaggtatatttaaacctaagcttattcataatcacattacattacatgtaaatcattcatatacatcaatgaaaaatcagaaatccaattctgtctaccaaaattctactgtaaatataaatacatagatatctgtgtgtgtagtgcaaacaaaaatttatagaaaactagagttactatattaatgtcaaactaaatatatttcagaacgaaatatattaccagtgatagaaaatatactcactgattataaaggggtcaatttattaaggtaactaaacaatattaacacaaagaaactatacatgttaaggtgatgaatatcagaatcctgatttgataattgtacatcgtatgcttgtatgcatatgtaccccacacatatgtgcaactattatgtatccataataattaaaaattttttagaaataaagaattagataaatgtaatagtgccatgtgtttatgttagaaaagaaaaaagaatctaatcagttcctaaagcaaattaaacccaaacaaaacagaatgctattgtctgaatgtttgtgtctcctcgaatttcctatgtagaaatcctaactcccaaacttatggtattaggagatggggtcttttgggaggtgcttagatcatgaaagtagagatctggggctcttttataagggtactaaattagtactacattaaggatagtaaatgagtagttttcttacaaaagagaccccagagagctaccttgctctttccattatgtgaagatgcagagagaaggaaccatctatgaaccaggaaatgggccctcaccagacatcaaatttttgagtgccttgatttcggacctctcagcctccagaactatgagaagtaaatttataagttataagtttatattattataaattataaaattatgttgtttataagccacaacaaaaaggtatttttctattgcagtcgaaatgtactaaggtaaaaagaaataataaaatacatataagaacaaaaatcaataaaaattgaaagaacaccaaaatggaatatcaataaaataaaaagctaatttattaaaaaatgaaaaaattctagctatactcaacaaaaaagagaaaaaatactaaatactaaagccagtaatgaaagactgtcactaattatactatagttataaaatgatagtaagcacacaatgtttaaactttatgcaaatacattttaaaagtttggtaaacggacacattacttgagagaaaagaggttacaaaattcacttaaaaataaagagacaccatgaataatcctgcatctattaaatacattaaatctataatttgaaactcacacgcaaaataattccaggtcaggaaggtttcactcttgtattctcacaatgtttaaagaataaatagtaacaattctatgcaaagtctttcagaaataaaagaagcagcaaccctaacagtacattatatgaggtacagattacccataaaggaaaaaaataggtagagattaacagaaaactacagacctacattttgatttgaaaaatttgtataggattattttattaaaagtagaaaagcatttgatgacattttacacatattcataataaagacttacagaaaagtaggcaagagaaacaaattatttcaaaagtaataaacatatataaaaatagttaatatagtgaaataccaaatggttcctcctactataagaaagaatgtaaaaatatccactatgaaccattctgttcgatacttagaaaactgcaatacagtgctgagagacattaaggcagacctaaataaatggagagataaaccaagttcaataatttgaatgctttgtagtgttaagaaggtagttctactaaattgatttctagattaattgcaatatcagtccagatctcagtaggctttttatataaataacaaatattttttcaaaatttctatgtaatgttataaaatattataaattaatattgaaaatattttacatgaaagttcaaatttctggagccttttaagataagaggacggcagtgtttctatggtataaatactaagtatataaaaactgaagacttctattaatatcagacaaaatgggccacaaatcaagaaatatttttagcaggataaagatcaatataattggtccaattcatcaagagaacctgataatgcaaaatgttttttcacacattaacaaacaattctgcatttaaaatactcaagccaaaaacttacggaattgagaagaaaaatatacaaatccacaatatatttaaagatttgaaaactattttctgatattattaaacaagtaaataaaaaattttaaagaaaatatctacaaatttaatgacattataacctaacaagttctaggatgcatggaatattatactcatcaccagcaaaaacttattttattttccacatgcactaacattcatcacatgttaggcaacaaataataaagtttcaacaaatttaacaggattagatcttggagagtatgttctctgatccaatagaattaaatttaaaataaaaaacaaaaccaaaactacaatgaaatccccaaatatttagatataataaacttctaatgatgccttgaagcaaatagtaaatcaaaagataaattagaaagtattttggtctggataaaaataaaaacactacaacttcaggaatcctttggagaaatacgaagtttttaatgtttgtattagaaaaaggagaaatgtctaaaattaatgacacaaatgtctacctgaaaaagtgaaaagaaaaccaaattaaacaagaagtagaaagtaaaatatagagaaaaactaaaatttcataaagacataacagaaattcaaaaggaaaagatgaaatttaaaactgattctttgataaaaggaataaactgaattaaattctcgatagtctgagaaagatacaagacagaaatctgtcagcaaccactttcaggaaataaagtgggcaaggttgggaagatggtgggtgttgtaaagatactacaaatatcaaaatgataataacttaaattataaaaactttatgccaataaatttgataatggttgaataaattgtatggttagcaaaataatctttacaattactctagaataaataaaatttcttcatatctttagatttgttaaagatactgaattttaatttaataccttcttaggggaaacaaattccagactcagatgccttcactgttacatttcattctttttaaataggtaaatgttacagtgattattactcaagtgtatattctgagaatttttacaataatttgttacatagattaattttttttcttcaaaatacaactaatttactgattatactttttaggtcttctattaacattattaggaaaatttagaaaatttattcatttatatacaaaattaatagacacattaaatactctgtgccacccaatgcccaattcactgagaacattttactgaataaacaaaaaattttgacccttgattaccttattgttggaggtaacaaaccatagaagatagacaatgtaaaaataaataagtggttttgacaatggacaataagcaaaaatacctgttcacttgttgtattggtacattctcacactgctataaagagctgctagatgctggttaatatataaaggaaagaggcttaattgactcagaattctgcaggtctggggaggcctcagaaaacttacaatcatgccagaaggggaagcaaaccatgtccttctgcacattgtggcaggaaggaaaagtgcagagtgaagggggtaaaagctttttataaaaccaccaaatctcatgagaactcactcactatcatgagaacaacatgggagaaccaccccatgatctaatcacctcccggagatccctcccccaacacatggggattataaatctgattataattcaagatgagattttgtgtgggaatggagctaaatcatatcactagaatagataatatatataatacataagtaaattttatagtatactagcagatggttaattctactaacaaatacagaaaggtaaaggatgaaagggatctcttgcttaagaaagggatacacatttatatgtgttgattttaaggaatcaacaaggaatgattagcaagacttgaagagaaaggagaagccatgtgagtctctggggtggaatgttacaggcaaagataaaagccaggaaaaagcagacacttcctatattcctgtattcatccatttttatgctactgataaagacataccccagcctgggaaatttacaaaagaaagaggtttaatggacttatgtttccacatggctggggaaacctcacaatcatggcagatggccaggaagagcaagtcacatcttacatggatggtggcaggcaaagagagagcttgttcagaaaaactccctcttctttaaccataagatcttgtggaacttattcactatcatgaggatgggatggcctgccaccatgattcaattatctcccacctggtccctcccacaacacatgggaattcaagatgagatgtaggtggggataaagccataccatatcaccatctctgtgcaaatgctctctctcttctatttagctctgcaattctagctaaattttcctttctaagccccaatcttcaatttctcaatatacagggagagttatcctttctttggattatcctttcactgtgtcttctggaaactgagagaaagcttgggataagtcagattttattttttcttttgtcagggatcagcatcctcagcttcttgtcaatggttaaaaaatcactgttgattatatttttctgcagttagtttttatttgtgtatgtgtttttgttttttgtttgtttgttttgtaaagaatttagtttagttcctcttattgtatcatggcgaagtacagctatcttcaacctattttttctgaccaatctttgtctttatattgatttaacattactttttaaatttagtcttaaaattcttactttaaatagtagttttagactacttatatttaatattgttatctatattttggccttaaatctactatcataaaatttattttccataaaatttaatctgttctttattactattttccacttttgatgctttatcttggattaagtgtttaattttgaattttattttatttcaactaataagattattagtcatatgtttttgcttattttgtcctgttaggtgctctaaggtttatactatgtaccttaactttccaataacattaaggtgactgaatatttttgccctgatacctagaaaaagacaagcatgcttgctctgatacattcttttgaagcttatactacatgtcttagcaatgcattgagagaggtaagaatacatacaatttagaaagaaagatgtctttcttcacagatattgtattctgtgcagaaaataaagaagatatttgcaaaaaagttagtaaaattgtgtgtttatgtagatcacaggatataataataatatacagaaatccagtatattttgatagatttgcaatgaccattcataatctgagaaaaaaaaaaacaaggaaaataagggagtgctcaaatgctaagaaagacatgttaaaagagctgagaaacttgaatagttcctactagcaaaattagcaaaactgaatcaataaaataagtaaaggaacagatcatgggccactgaaagaaataggaatccatgggtccacgtgagataaatccatgaattaatgaatgaataaaagaaggaaacactatttttttcccacagagtgccaaccaataaaaggaaaagggttgatattgtatgttaaaaaattatcatttgaaaatcttcacattgtatttgattgagtgttgaggcatcaatggatgctaaacctagtgggtaaatgttggagaagaaataggatattttcacagtctcaaagtatctctccacaaaacacttaattttagattaattacatgtatatatacatgtatacaatagatagtctatatataaaatatcattttatgtcatgttatattaatataaagaaaatgaggagtacctctgcaatagagaaatctggaagacattacctttcaaatgatcaaaattaaaatcaccactgatgggaaaaattaatttcatatataacctgaagaaatatgataagaagagcatagcatcatgttggtgattttattgccaataatgcatgtcttgacatctcattatgagaaaacaccagacaaatcgaaattgggagacattctaaaaatagaatccattggaatattaccttcaaaaaatgtttaggatgctatgaaggttgaagaaggactatggaatgcttctgatttaaagaagttaaagagacataggaaccaggaacaacacattatcctgaagtggattgttttttataaaaagcatcagggcagtttgtgaactagaatgggtcctctcttggtgattgttacatgacagctgtttgcatcacttcagcaacttaaagataaattgcttaaagataaattggcgtcgtttcatacaaacattaaagaaaatggtaatgtccaacaggcacagagtgcccgcctaattactgttccaggggtcctcagaggctgttttcctactatcttcttgatttttaaaatatattttagttgattggttttattcatgccataattggtggaaattaatccttgattctataaatttttacctagtccgtttccaatgttttttgtttgtttgtttctctttccttacttatttatttattcttttcttttactttttttgtaaagtggaataagttaggaatgagtatattatgaccaactaaactgagtagttttatgtcaagttgcaaattatgttaagtatcaaatatttgatttttcttagatttcagaatagtcacttttcagaaaaaatcattagtagttttctaaaaataaaatcctcttgattcaacaaaacatacttgatgtggtttttcctcccaaaacaggctcctccttgagttattgggaataagtaatgcttctcaataaagcttcgtgtcaacaaatctgaacatataacatctcagctagagcaagttactaaaaataggctcaatttgtatcttgcagtcatgccttcataaccacttttcaattaatcctgcttaattcagagaatgtataaatatgtaattttgcatcacttttaaggcagccattttattttgaaatgcaactaatgttatatgcataaattcaataaatacaaagctgttttcaaaaattgaatgtttttacttgtaagttattctttcaataataataaagagatgatcactagtcattttatttttcatagttgaattgatttagttgaacttcattgggtgttcttatgttttagtcatgagtccatgctctttaacaagctaaaggaaaccataatatatgctaaaagatgtcagtttgtgaacaatttaatgaatatatagagttacaacatttttcccgattggatgttggggtttactataattctttgttactttatatgtgaatatactcactactcactatgtttatgtatgtaggaaacatgctagtgatgaaaattcaagcagttattaccctggttttctttcattaacaaaatacagaatagaaattatctacttattcttggaggtcttaaaatatcttttcagttgactgataattctgctatcaagagctacaagtaggtgctctggccatctatatctgtatttccgtatattcaattccttactatatatttctcatttgatattctatacccaattcaaacaaaaccatttcatgtatacaatgtacttttatttatgcttttctctatcattaagtagaaagccatttgcaccttagtctaaatctgaaatgtgcctctacctaacctttctaatacattttcactatttcttagttattagaataaatttacataatttctgaaacaactttctctatggagtattccctttggtttcttttcccttccaaacaatttaatgaattacaaatatgggggagatattttttcaatgggtaagacttgacttctacaaatacatgtttaattccttctcaaaattatttctacttcctcttattcaacactgtgctagattttagggatatataataagacaatatatgaggtccttgctgttgtgaaaggtacattcttatctttggcaaattgtagaatctttagctttggtatacaagggcattggtgtttggtacatgcttggctctttgccttaagaattgcctctttccaccatgcatatttcacctgtgtgggaattcttgtagatctctatattattgatagccattttgctctgacattttatacaaagctgaatcagcaacagtatgactaaacacaaccaaaaaggaaagctagaaagattatattagacacttacgtgtatggatcattatggtgaggactgctaaaaaaacaaacaaacaaacaaaaaaaaacaaaaaacaccttcagccaaaataaatttacagtttaattgagtggtgaatgattcataaattggaaagcccccacaatcacagcagattcagagagactccaggggtgtctcatggtcagaatgaatttatagacaatacaaagtaaagtgatgtatagaaatcagaagtgaggtacagaaacagctggattggttacagcttggcacttgccttatttgaacactcagctgtatgtgactagttgaagtatggctgctggaattggccaagactcagcgattattacaggtgcatattcctaagttaggttttagtcttgtgtacctattgaattaggttgcagttcattcacaaggactgaaatatagaagtatggcgtttttctcaggccatatttaatttgatttaacaggactttgggtatgtcattgtattttactagtatattttacaaacaccccatgttatcttaatctatttaagttcacactttttaatcaaattttactttaaatgtatctaacctcctaaatttctgcctttgtgaaccaataatactttttccaaattcttattatagcacatatcagactatatagctatagacactttggcatcattgttttcccatacaaaacacaatacatttaatgaattaatgaatgatgcatcagcaaagaaggttttactgaaagtaagaaaaattataagccagtttgggtttcccaagaatcagacaccaagatggtattacacatataagagagtaaccagagaaaacacctttgaagaataaagagaagatagagcaaaaggaggctgcaagagcctccagatcatgatgcaagcctggcacctcaaaagaagagagagcatgaaagataattggaaaggaggagcctcagagaagagtgcatatctgagaaattgtcagccacactggaagagcaccaaagtgaactttgacctttagatgagtccatgtgggacaagaatgaaaagccctataatatcttccttgctcagcattggcagggagcaacctaaggagagcatggcacctgcatgtaagccaaaaataaaattcaatgtccgttaaccaactaaatgggccctttatcttggccaagggcattttaaactaaacctgaaacagtaatggaggccatgatggaaatgggtggttgaacatgcttcgttatttactttcatccttttggaattcatgcatagctgaacagtgttaacagtaaagtagagacttaagaatgacaaaacagacccttcatagcaataagatgtcaacatgacagatagcaggccttgaaagaaatcaaagtatttcactacaaaaatacatttctttgacatattttgaaatggccctacaaggctgtttctgtggggaaaatctccattttgtagagaatccccttctctttccaagtctttttcctgatttttcctgattccaagtcctttttcctttttatgtctgataaaaatcatttacaatctattctcagtgaagcctgctacctgcaagcttcatctgcataagaacctcggtctctaaaacaccttatcttaacccatacactcctgtctattgattccagtctttagataaattattttagccagttgtcaaatgccaatcagaaaatctttgaattcacctttaacctggaagccttcacccaccccacccccacctgctttgagttgtctagcctttcccgattttaccaatgtatatcttaggtgtactgattgatgtcttatgtctccctcacatgtataaatccaagctgtagcccaacaaccttggcacatgttctcaggatctcctgggctgtgtgacaggccgaggtcactcatatttgcctcagaataaatctcttcaaatatttcacagagtttgactcttttcttcaacatgcattaccactgtagtagctctgaagtggttgagttggaggtaacccaccaacaaccctcctcctggaaatttctcttgaatgaaaatatgggaggagtaaattcttcactgccaaatactatttcaaattctttcaagcataaggtaaattcattatttaacataaaagtcaatcaagaggtaaaaagaggtcacagtttgcttacgtattttctggcacttctttgctattggctgtgtcacttttacccttaacatttctgcaaaaatgtctgcagacatttagggtcaacatattcagatacaaccttacccagaagaccaagaaagagacaccaagagaaacatttatcttaaaaactcttaaggtaatttgccctgatttgcctttgtactgaattgggtcatatgcgtatttttgttcttacttttggcaaagaatcaggctatacttagagtaatcacatcatacctgaatctgaagacgagacagtaaacttagagaagtactgaagccttggaagccttggatatattgaatatgttctatcttagaaagaaaaggtgagataatgtatgctggcagtcaaccaacagcatatgctcctaatgaacaactggagagtcatttaagttcaatgttggggattttattagaaactgtaagatgaatacacaattcattttctctttccttgtaaatttggacaatatttgctatattcgcctatattttggcatagaaatttaggttctaagtatatagtagtgatgtagccttcttacagggtcacatagacccacaattaataatttttaacactctttttattctctctggttggctaacattaaaacaatccacagaaaacccccaagagctatgtattgaggatggcaaaaccacagatgggaaaataataaatctttgaatgaccctgcaggaaatcacagatagcattcctattatttaagcaagcaataacttttattgttttaagagttggaggtttaattttttcagcattactgttaccacaattattacaggaaatgaaactagtaaaaaaaaatagagggaacaaagtttattgacatctatgaggcattttctttcccctaatattacatactctagattttatttctgtacaaaatatattctctatgtctagcctaaagaactatgtcttattcatatttatactcttcatagatcaaaagtgtgcttaaaatactgtacatttaatgagttatttttgaatgtaagcaactttgaattcatctttgcatttttaatcttatgttgctattaaatgtattattaaattctactaacactttcctcaaaataattctcaatattttggtttttaattttttactgcctttgcattctcctggcagagacccatttcacctcttctatagattatttcataaagattttataatctgtatcatatatatttacaatattaaaagttatctgtagcactctctcattgttgcttatagattaggtttgcttctctatgtactattctggtaggcagtggttaaatatactgctttaagccttttcacagtaccttctataatatcatcatgcacagttttacgcacacagcagaaaatcaatgaaacatacttaattgactaaaaattgaaaaacattggtatatatgtaggacagatactgatatttttataagcccaactctgaaatggtgatgcataaaaagttgataattccttttagcagaaactattaatagtcatttttcaacataatgcaaaatatatttgagattgataaatattttagaactcaagtgtaagaaagccattaagggaatcccacaattttctttgtttctaaaacctaatataatttaagattatgaacagccttctttctcagaagaaaaacatatcaccaacccactacataaaaaaaatgcattattccaatcaatcttgttaatataccatagaatattgaattttttaaaaaaattcagaactttaaaaataaatactaaccataatagctcaattaaaattatctctatattcttggaggttttcaaatgccatatctaaaaataggatatagtaaggtatatcgagggataaactagctgttaaaaaatcattgattgagacctgttattattggctaagtaaacttctcttatcttccaaaacatgttccattatttcataagatctagaaatgatatcacgtttgaaatttgttgaaatgttttcctattgacctacttataaatgggttatttacatattcagggtaattacttgtgcttaaaactgttttcaagataaatttgaactgtgtcattgttcatataaaagaaagatgcttcttttcaattaatttctattagttaattctacaaattgtgtttatttcaatggagattaaagaatataaaaagaataatgtttctgttttagactatattagtaaaccatttgtggggtggggcaatgaggataaactccatcaaaggaacataagttagaaaagttgtaacataaacttaggttataagtctgaattaccctagacagttagtctatggaatatgcgactgtatacagcctcagctggaagcactgcccttaagcaaagaccatgaaagagatgctgaaataattattcaggcagaaatttagtatgatatttctttgggaatgttctccgatagttggaagtcaaaataacaagtaattctcacttccattctttgtcttctcgatatacatccctatatcttgcaaggcatttagcaaattaaagtacatttaccagcctccttgcactttgatgaggcaatgtaactaatttttggacgataacgtgtgaacagaagcaataattgcagcatctaaaagaaatgtgtgtgaccttttacccctgttaccatgctttagaattcatagctgctttcagctactttatatataaaataagcatataaaagcaacaaaataaatcaacatcatagagctatcgtgacatcactggacttctcctaaaagttttacatgaaaaatatgtgaattatttcaagctgctctacttgtttttcatagactgtgtcattaattaattttttatgtatcactaaaaagcatttttaagtgcctctaaattatggcacactgctaaatattttctagatgcctcaaaaaagtttttatatgcagtaattttgttttacatatacatgcacacttactgatttcaagttttttcaactttcatacgaaattgaaagttgaaaaggcacatgaaatgtctttttgaaattcctaacacaatttaatttttttttacatttaggtttaccatattgttttaacaaaatgctctgtatttattctaatattttaaaaactttaggaataaattaatattttggattgttctacagtattgtatcctgaactggaactttttttactgatttattaattgaaatatgaaatatgatatgcacatgcgaaagacacagatcttgagcatatagcattaaacatttttagaatgtaaaatactaatgtcatcacaacctacatgaatatgaattgagtattactagaatccaggagtctctgttgtgaacctccaatcattactataggcaaccactgttcttacttttatctttataaattacatttgcttgacattgaacttcatagaaattgaaccatacaatagatattaatttcaatctggttcaaaaaaacacaaccaacagcatgggtgtcagtgtgatattctgggctgcttctcagctgaatcaatggtgctgacagctgcaatagcaacagaagtgtcttcagaagttttactgagagtttggagtccagagtttctgcctaacagcagctgcactcaaatagggccaatggtcagtctggaatcatgggacccagaatgcaccaccttcccctactcattttccacagttaaggatggaagtggcttccttcatttgctcatcatctggagtagcaggccccttttgctccttcagtgtttctaacattgttgtaaccacgcccccaacccctgtattgtattgtctatgctttaaaaactattttgtggacttgaataaaatttattttcccattcctgatataaaataattgggtcattctttactcatgtatcagttcaaatttctaagactctatttatctcttctcctcaataatgtttcttttttcttttgcttttttttagacagggtcttgtgctctcacccaggctggagtgcagtggctggaacacagctcactacagccttgacctcttgaattcaagtgatcctcacacttcagcctccagagtagctttgatgacaggtgtgtgccactaggcccagctacttttctttactttttgtagagacatggtcttgccatattacccaggctagtctcagatccctgggctcaagtatcctcctgcctccacctcccaaagtgctgggattataggcgtaaaccaccatgcccagctaatgttttctatttaccatagctttttgcatatatatgttattatatatgttatatatatatatataatatagtatggatgtgtatatactatattattaacaattagatctaaaatatagaaagaattttaatacctttattttctgtaccttcatagttaatctcatattttccaaatctgttaatgtggcactggtcagagttatagctccaaagaatgagcatctgcttagtctcataaccaggacccaacctgcaacattagtgttacaaattaattcctaattccagtctcactctttcatcaccagttctatctctgaacacttactaatcccaattattttaaagcaagttgcttaacctgctgtggcagttttcccctctccttcaactttctctctcttttttttctcctaataatacctgccaagtaagaatccctttcattacatacatcaaatagccacttattccaacaattttattcaacctaagtattcaacctaagggcttagattcatggtctgtccttacaatgccgttccatctttttaaagctaattgcaatgcacctagtcatttttattgcacactatgtatgatagccaagatacagaataagcctaagtgtctggcaacagatgaatgcataaagaaaatgcactatctgtatacaatgaagtactctgtagccataaaaaataaaatcttgccatttatgacaatatggatgaatctagaggacatcgtggtaagtgaaataagccagacacagaaagacaagtacagcatgatctctctcataagtggagtctaaaaaaaaaagaaaatacaaacatttaaaaaagttaatagcatagaagcagagagtagaaaaatgttaccagagactaaagaaggatgaggaaactttgattgatggtataaaattacaactagataagagcaataaattctggtgttctgttgcatgtagagcaagtatggttaacagtgaaatatcgtatattacaaaatagcttgaagagttgtcttcgaatgttctcaccacaaagaagtgataaatatgtaagataatagattcactctgaatggatcattatacaacatggataggtatccaggtatcaaattgtaccccatgaatatgtacaattattacatgtcaattaataaataaataataagaccactagatttaatcaagagactcttattgacttgttctcattttagagttttaaaactagtctgccctattgcaaactacctatttttaaaactactcttctcctgcacaaaaatctctcaaagtctcctttctcctgaaagaaaaatgacctatttaatttacaaatatttcaaaaattagtacacaacattttatatatgaaaataatgctgtagactgacttgcaaataacattctaagattcccattacctttaagaggagtcagctgtcattttggaaaaattaagatttcaacaattttacacatattatgaaaatatttttgataatgaaaaatgctcaatcttaaatagtgtaaataagtaaatagagaggtaaaataaagagcttaatgtttatgtgatattgagaaaaaatcttttttaaaaataaaatacagattaaaatacaactttgtgctttaactgaagggtgtccctactccctgatgcatttgagactgtcacaaacctgaacccatttggacaatacatcaaataatcattttgcatcatttcactattggggaaatgataacttcttacattaaatgaaaaaaactgaaaaagtagtattactttgtcttttaagtggcgagatagggttgatatgatgctgaagtacaaacagtaaggactaagtgaggatggaggatatatgaataaatgtatcaaaagtcaagagaaatgataaaacagacaattctggggaacagtagtagaagctatgcatggaatatggttagacagacagtgatatttacttttgagttttgcttatatatttctaacatttcttgataggactggcattctaacagttattcttattgttataaattcttttaaaaatactttttctccaaacatctcagttcaaattatagagttaaaggaaactacagtcataaaataaaatattaattatttcaaaagaaaaagagaaaaatttgtacacttaatttaaaattgttttcagtcttatttttgcaagcaatttaccaatagatttgtaatgaacagtaatgttgaatgggtattgaagctattgaaatagagaagtaagtcagtttttcattatgctgtgagtgatgtcctgaaacacattaacttggtattttatctattgtttaatatcattccccatgaattacatataatggtaatagattaatatctttggaagtactgtaataattatataattcagccaggaattaccttgttcatttgctaacattgttatattctttcaaaagcaaacagcaaaaataattttcaactgacatacatatggaatacttactcttcaactatctcaaaatgcccagattttctcaataactctcctattgatttaattataggcattagaaatgagtattctagtacaagaataaatagtgttgtctctccttcatcccccagtactcctaaatatttactaaaaatctcaatgctaatcaatagtggaactatttggtgcctaatgatggcattccattccttccttgaagtccaacacacagagtaatagaaatctcatgaacgtgattgtgtgaggttgctcataatacttggatctatagagagaatcacttaacagacatcagttgaatcagaaactacttctcatttcattgagttctatgtagtcctcaacctttgtggcaccagggactggttttgtggaagacaatatttccacggacaggggagcagacgatggtttcaggattgtaatggttaataataggtgtcaacttaattggattgaaggatgcctagataattggtaaagaatagtttctgggtgtgtcagtgagggtgttgctggaggagattaacatttgagtcggactggtagaggaagacccatcctcaaggtgggtggacaccatccaattgactgtcagcttggctagaacaaagctggtggaagaaggtgggataagctgacttaacgagtcttctggctttcatcattgcactgtgctggatgcttcctgcccttggacatcagactctaggttctttaggctttgaacactggaacttacagcagtggttttccaggggctttcaggtccttggccacagactaaatgttgcactgccagctttcctacttttgaggcttttgtagttgaactaagcctttgttggcttccttgcccctcagcttgcagacagcctatcatgggacttcaccttgtgatcgtatagtcaattctcattaataaactccttttcatatatacatatatcttataagttctgtccctctagagaaccctgactaatacagggatgaaactgttccacctcagatcatttggcattagattctcatgaggtatgcacaacctagatcccttgcatgctcagttcataatagggttcacattcctataaggatctaatgctgtagctgattcgacaggaggaagagctcaggtggtaatgctcactcacctgccgctcacctcctgctgtatgatctgattcctaacaagccatagctcattaccaagggttgaggaccactgtgttaaaagataaactaaggcacaataaaattttaaatatgttatttaaacaatgatttatgactcaggcagctccaaaccataaaagtggcttaagagcgccactgacggagcacaggcggaggcttttagaggacaggcacagaagaaaactaaagataatatttgactatttatagttgtacagttatttgtaccttatttggtaccaaagttgcacgttattaggtctatcccactggaaagtcttcagttatatgattatgtgtgttggctacttctgattggttgaacttaagttctgtttttctttaatatagaaattgataagaatggctcaagtttcccttatatctgtagatcaaacaaggtttagatcacttatgatgcctaactggttttgtctgctcagaaattcttcaggcctggactccattttaatttactttaatgattgttactttaaatttggattaaacagtggattcatatgtactgagtgaaaaaaatggaaatagatgttataaaatttatttgaaatcattcagccaggatgttttaaacagcataaattagcagaattaccaaaaacacattttgaaaaaaccttgaagcaattttaatgtattgcaaaatgtgaaggagactagtaggacaaaaacttaaaggttgagtttgagatatgatgcagggttttttgctccttagcccagctaggcctaagttctgaagaagtaggcacatggacactcaaagagtaagtgtagtagaatttatttagtgaaaggaaagctctcagcaaagagaggggtcctgacatcaagttcttggttgcccccttaacggttgaatacaagggcattttttttcttgagacagagcctcactctgttgccaaggctggagtgcaatggcatgatcttggctcactataacctctgccttccaggttcaagcgattctcctgcctcagcctcctgagtagctgggattactggcacacgtcaccaggcccggataatttttgtatttttagtagagatgggatttaccatgttggtcaggctggtctccaactcctgctctagtgatctgcccgcctccacctcctgaagtgttcggattacaggtgtgagctaccgcacccggcaacaaggacatttttatacaagctgatagggctgtgaattcctggttgtatgagaagtgaattcctggttgctccactccatctttccagtgagttatgtgggcccttagtctgtgccactccatattgatttattttccttaatgcacatatgttaaggaatgaaattttccactatgggcatgtttaggcaagctcccttagcaagtacccttatccgcacaaaatatttggtataaacacctgggggtgggtaggaggttctccaggggaccctttcctgactgtctccctaaagcaagttggctgactcctttcattcctcccttcaggagtggagaccccaaattctgttggggaaagtgtacaacgactgctcttaactgcttcctgctgacaagggttgctgttttgggaaagtggcagttaaggctcctcctgaggtcagtttaagggtccccaaagagaacagtgtgttcatgagtggttctgtttgcatcaccatttgaagttgaatggcctttaagaaaaaatttgggttattagaagacatattcagaatgaaacaaagggataaggacagctcaaaacaaaacaaaacaaaaatctcaaggctgccaatacagccagataactcgtggctatagttatgcctgctaaggtttgtattcatggggcttggctttgattagctcccttggtcttattttcccaaacaaagaaatctctgggttatgggcacctatttactccgatcacctggaaggatttgcaggataattgttcagaattaaaatattgatccagattttttatattactcatccctttggttcttttgagctgcagctgtacattgctggttggtccacaggaataagcagggtagtctaaaatgtagacaaaaacttaaaaacaactaatgggattataatgtaatgacaaatgtagagtaagttttgaaacataatttctctctctccagtcctcatttttgccaaaaacaaatcatgataggactcagttgtttgaaaaacaaactttagccttatacttgtcttatttgcataaagtgcaaaaagaataattatttttcccataggcttttaaattggctttgatggaactctgttccataaggaatctcagttaagaccttttaaggccaagcccagtcatgggtttccaccctcaaatatctacgagtttggtaaatcattctcttcttgatgtctcaagaacaagctttttaacaggcccaagagctttttaacaggctcctaggcctgttaaaaagtgacatgctttacttcccacgggttaggaaccttgtacaaggactgtgttgacaaggtatgtagccagttttcccaagagacttttattggcaagtccagcttaattacttaaaggaacatatacccttccagtaaaagccttggtaaaaccaccagtttcttcaattgtgtcctgttgcaaaagaaaatgtattcttattgcactgatgaaaataactgtattgccataaattaaatattctcacaaatagtttccaaattctggcaaacccaggcagagagaaacaaacgtccttcaaattttgttcacaggagtatagtttactcaattattaaaggctttaaataattcaaaataagtatccttgactcagaaaaacaaagcaaggaaagttttaagcaaaaaggttaaaaataatacttgttttctattagttcaatccattctgttctcttgttctgctagatattcatgaacatttcagttcttcatgagtactgtatttttttcaatgtcataatctccagagttaatggaatcttgcatttgagaacacttgtcaaaatcctatagctgattataaatcatcttttgagtaggatcaaaacaagacatttgtctgtgaatgatgaaatgtctaaggtagttactgtcaagaatacaaatgacaaagaaatttagtcatttctagggtttacaataactaaacataataaccttaattatgattgatagcatatactcagacattagaattttagaaatctcatataattttgaaacatattaatattattcactaaaatataacctaaagcagattaaatataactttggaaataccatataactaaacatttcaaaaaaaccagttttcttctcttttggatgttccagggaccaggaaagacaattttgaaactgaagtttgattttgggaagcctgttaaatatgttagaggttcaaagcacttgatattataaaatagaattccaagttaccatatgtcatttattttaaccaaaatgatgactcaaacattttaaaacaacacaaaagcatattcacaggtagagggaaaacttagctttccaaatgatctgtcgttaattttacagggaaatcctgttcaagtgaaagcctaatttcatccttgcattagtctactgttgatgtcaaccccaatttttttaatgaaaacttatagatattatatctaatcttatctagtttgaccatgaggtgagatttttttaaacttttataaccctttacaaattgttgttaaagagcagatcagtgcctttagaaaagcttgttgtgcttttatttcaatgctcaatttacaaaaacaaaatacttttttgaaattagtcaatatgttcacacaatttcttttgcaagattaatttttacaaacttttcaccatttgtttaaaccctcagctttatcttatctaattcaaaacaatcctttaacccaaggcaaaaatttacattttcatgctttcttataatcttttactaaaaacatattttactttccttacttaccttatatataaatctattttcattgtctcgattacaggttattatggtaactcttagcaatttttaactttaatgtacaacctggcaagttgctttaattatgtagtagtaggcataaataaaatctgattcctttctgcataattaagggtgtggttaattccatatgtccctggacttattaattgtgaagcaggcaaattgaatagtgtattagtcaattttcatgctgctgataaagacaatcttgagactgggcaatttacaaaagaaagaggtttaattggacttacagttccacatggctgaggaggcctcacaatcatggcagaaggtaagggggagcaagtgacatcttatgtggatggtggcaaaccaaaaaagagagcttgtgcagagaaactctcatttttaaaaccatcagatccatgaaacccattactatcatgagaacacataaaaagacccaccctcatgattcaatcatctcccactgggtccctgccacaacacatggaaattacaggagctacaagatgagatttgggtggggacacagagccaaactttatcaaatagttcttaaaagccaaagaagcagttaataactttgaagcatttagctaacctagtatctgacctacatgattcagcccacatatttacattttaaagacatttgtattttaccaattatttttaaaactgcctttatttcttaaagattatagtcatgtgaactcaaaaggtattacagcttttatttttcttcaaaaaatatttgatctaagtgcttattttcctagagcttttttatataaacatcacgcccataagaaatataaaattacacagatgaacaaaagcaaattcagtacttgtaagatttttcatttgccaatcttctgaatagattattggcctctgggtgaagcccttcaagagcagggcctaggacagcatacagtttctagggcctaataaacaggcatagctggaagacagagatagattttgagaaggatctatccacttttaattcctggggtttcatgaggaaaacagagggtgttgttttccccaaaatggggtctgcagcaccttctttgttttttcccaggagccccgggctatcagaagttatcttagagcctctcatgtatgcactgaatgacaagacaaaatggggaaaaaaaaatcattcaacagagaaagaacctttttccagaaaaacaagatccatgcagagaaaaatttaaaggcctttaaatatacctataacttggatatccacttttaattcagctgtgctctaagaaaatcgtttcaaatctattatccagctttagccatgccgagcagccaatatttctggctttagaactttattaaaaataacctcacaggtgaaaccaacaagcttcaactaagattatgacttaactgtaagtgtaaaagttattttcaaagaggtgctaagcagtttttacagaatctaagatctttaaagttggttcagacaaaggaagatttaagaaaggaagctagaagttgtttatagaggggaagagaatcagcaaatggtaaaagtcacacagatattagccacaatatactcattccctaagccaggattaaacccaggccaccattgtaaaatggcagaggccaaaagaaagtattatcaagtggttacaaggtcaagctcctaaggacataaaacaagatgaagaactgcagcaaggtttgttactgaccagtttgccaggctggcttgatcagcaaacttttggggtcctaggcctgcattctatcctaaggtacccctctttatgacagaactatacagaaagacacacaaagcacactacattggctacagcttaagactagcctcataaatcctttttttctattcatcagaacttcagagaggatataaacagtgatttaaacagagattttatcatttattcaactggtttgcacagggagagggaggccagaagtctgactggtaagaactttttttttttttttgagacagagtctccctctgtccccaggctggagtgcagtggtgtgatctcggctcactgcaagctccatatcccaggttcacgccattctcctgcctcagcctccggagtagctgggactacaggtgcctgctaccatgcccggctaattttttgttgttgttgtcgttgctatttttagtagagatggggtttcaccgtgtcagccaggatggtctccatctcccgacctcgtgatccgcctgccttggcctcccaaagtgctgggattacaggcgtgagccactgcacctggccctggtaagaacttttacccttttgctggtgtaccagacttctgagttgccctttttcatgctcagttttgagccaagcagtttaaggtttggggaaattaacttttcccagtttaagggatgcatacaaagggagtgtcctgtggtacagcgacacaaggacccacccacaaagagaggacagaggaggaaaaaggagaaaggaggtgttttttcagaagagtcctagtgattcaggaggcaatcaagagaaatatgggctgcagatgattggttactcacctaagaagaggggagcaaggcatccctagtttcttctttttcctagtaaatacctgaggtacatgagggagaggagaaaagtgtcctctttctttcttctgttcttatatccctgagtcctggtgatcttggcaggttaccacccatgggtgccaatgcagctttcacctatgttaacagggggcttacagggtgcgagttatccaccattacccatgcgctgcttgtcccactgttgttgataacctttgagttctttagatttcatgcatgccatggatactagaatgacctctatccacgagatggaagggagcctaatcggcagcaatgagtcatgctaacctaaagctttggagctgggtcttccttaaacaaggaagagaaaaggctatcttgggaatgggggtcctggcctaataagaaaacaaaaacaaaaacaaacaaaaaacctctcataaaagttaactccttacaaagtggagaaaagaaaaataaaataaaacagcttaagtgcagggtggggaagatgcccgaggagaaaccttttattcttatacaaatgagttcctccaatagggagagagcattttaattgctgtctcctcctttctggctcagccaggggaggaaagacactgtgggtgcgtggggagagggaagagtgagcaggaaatgctggccacctagccaagtggggcccttgggctatgtgcctcagccgggaggggagggaggttgggagttgccactctcccatttgtctcacatgtgtacctgtggccattggaggttggggtaagggacatgtctctaaaaacggagggagagcacattgttctgaattgtatagaatttattaagttaaaggaaagctctcagcaaagagaggagtcctgaaagtaggttcccggttgccctcttcacaggtgaatacaaaggcatttttatataagctgatggggctgagttccctatttgtataaggcatgaattcctgtaggctccactgcatccttccagagtgcatgcagacccttagtctgagacattccatattgatttatttttcttactgcccacgtgttaagaaacaaaattttccactgcaggcatgtttaggcaagcccccggagcaagtacccttatctgcacaaaacatctggtataaacacttgtggagcaggtaggaggttctctgggggacccttcccttactgtctgcctaaagcaagctggctaacttttcagaaagagacagagaaaatgaagtagctaccaaagtattctaggtctacaagtgatattattttcaacaagtattcaaatgccattctagtctaaactaattcattataaatcagctaatattaagtaaatatttcacaaattaaaaactagttacaaaaggtagagacctcaaagaaaggcagaaatgaggcaaatgggaaaaaattatggtgacttaaagcctatatattgtgatctggagaattagaatttaatttgtctatacaaagtaggtcatgatcctgataagtttagcaattagagtatttataaaaagtaagagctaaataatttgtttcagggatgcacttttatttcaattatctagacctgaaattatattttttgagatcattcaggaagaagaaattacatgaggagaactttctaatcagtatgcttagtgtaagtatatctgatgagttcataagtctgtttcatttattattcttcagaataggtctgtagcatgacacaaacaatttctgatgacttcagctacctttttaaggaaggtagacttgctccatcccctatcttctattttgcatctgaaagaggatcatactcctgtttaagtaaactttattaatgtttttcaaaatatttcttctcttgccaatataaaataatgaaattgtagtaaaatgaggattgtcttcctcaagacgagtaatttttcatgaacaatttatttaattatttcaataattattcaaaaatgatttcaaattatttcaacaatttatcttatgaacatttatttcattatttattcacaccatcaaataatattttacgttaagtccaaattttttgcattgctgttcatgtcaggtttataatggaattcattctctatgacctcctttttaagcactgctaaatagatagtaatctttctttctataacagttgagtttaaattgcttttcttaattttctctgacagagaacattattttttattgttgtaaactagctatagtctacatatttaattatttggaatttgatttgtgtatatttttcagtggaagctaacttcttcctaatgtctccatctacatttcatatttattcatccattcacatattcaacaaaatttcagaatctgtttttgggcttttaatactcatcttattcattttactatttatgtatttatttctttatttatttagaaactggttctcacttagttgaccatattagagtgtagtgatgccatcatagctcatggcagcctcaaactcctgggctcaagtttgttgattttattttaaatgtccacacagtgttctcagtcagaaacagatttcttaataatgtgtgttggctgctccttttcccagttcttatctttggacagtataaagagatccagatcatcctagtgagaggctagactctctgaaagcaagaaattaagaacaatggttttgttccttgtctttgtttttatacttataataggatggaaacggctgtttttctgtccttctaagaggatatcttctttattccaaacttttggaatgttgtaaaatctctcctggagccaaataaccctgtgtctccaagtttttatgacctatagctgtctccaaattctggaacatcatatcttttgacgtatgaataccaaaacctagtcttcctcttaccctaggacttaacctaggaacctagtaatctaaggattttaaaaatttaaccctcttaggggagtaaaagaagttttcctattgtttcaaatcagagaaattaactggacaaagggctgcagatctaattctctcagtgtgtgaagagtctcaagaagctagtgctttgagagaatccatgagaaacccagggacctttaacatctcctcattattatttgcatagcatactaccaggggagatggagaattaaaataataatatatttttaataactttaagttctcttaaatcatatggttttttaaggattaaaaaaaatatcctggatatctatggctatacttagacatatgtaatatacatatataacacaatagcttttggggacaagtggtttttggttacagagtggtaaagtctgagattttggtgcccatgtcacccaagtagtgtacattgcacccaatatgtagtgttttatccctcacccacctcctactataccccttagttgtctccaatgtccattataccactctgtatgcatacccatggcgtagctaccacttaaaagtgagaatatatgatatttggttttccattcctgagttacttcacttagaataatggcctgcagctccagttggagttgctgcaaatgacattatttcattctttttagggctgagtattatgtcatggtgtatgtttaccacatttctttatccactcattggttgaggagcacttaggttggttctgtatctttgtaattgtgaattgtactgcaataaacatatacatgcaggtgtatttttgatacaatgacttttttaatttgagtagataaccagtagtgggattgatggactgaatgctagatctgcttttagttatttcaaaaatctccataatgctttacataaaggatgtactaatttccattcccaccagcaatgtataagcatgcccttttcaccacattcatgtcaaaatctgttttttttcttttgactttttaataatacctattatgctgggaaaagatggtatctcactgtggttttaatttgcatttctttgatgattggtgatgttaataattttttatatgtttgttggtcatttgtatatcttcttttgagaaatgtctattcatgtcattttttttcactttctgatgggattattttttcttgctgatttgttttccttgttaattctagatattaattatttgctagatgcatactttgtaaatattttcttctattctctgagttatctgtttactgtgatgattatttcttttgctgtgaaggtttttagtttaattatgtcctttttatttatttttgtttttgttgcatttacttttggagtcttagtcataaagttttggcttaggtaaatgtccagatgtgtttttcttagttttttttctagaatttttatggttttgggttttatatttaagtctgatccatcttctaatttttgtggatggtgagaaagagtgatccagtttcattcttctacatgtggctatcctgttttccctgcatcatttattgaatagggtgtcctttcctatttatgtttttgaatgctttgtggaagttcagttggttgtatacatttggctttatttctggtttctctattcctttcctttggtttatttatctacctttataccagtaccatgcatgctgttttgattactaaaaccttgtattataacttgaagtctcttaacactatgcctccagatttgttctttttgcttagagttgcttttgtaattcaagctcatttctggtttcataagaatttagaattgctttctctaattctatgaaaaacgatgtcagtattttgataggaattgcattggatctgtagattgcttttagcagtaaggtcattttcacaaatatgattcttcctatccatgagcatgggatgtatttccatttgtttatatcatctctaatttatttcagcagtttttgtagctctccttatggagatctttcacttatttggttaagtgtatttcaattttttttctgctgctattgtaaaagaaattgagttcttgatttgattctcagcttgatcattgttggtgctatgcagtagtactaatttgtgtacattcattttgtaacctaagattttatgaattcattcatcaaatagaagagtcttttggtggaattcttaggcttatctaagtatatgcttaaatcatcagcaaacagagataatttgacttcctcttttccagttcggatgccctttatttcttcctcttgcttgattgctctgggtaggacttccagtactatgttaagtagaagtggtgaaaatgggcatccttaacttgttctagccctcagtgggaatactttcaacttttccccattcaatatgatgttggccatgggtttgtcatatatagcttttattattttgagatatgtttattctatgtctagtttgtttagggtttttatcataaagcaatgctggattttactgaatgtttttatgcatctattgagatgatcatatgtatttggtttttaattctgtttatgaaatacatcacatttattaccttgtgtatgttgagtcatccttgcatccctgggatgagactcacttgattatagtgaattgtctttttgatatgcttttggatttgatttgccagtatctgttaagaatttttgcatatgtctttatcagagatgttcatttgtagttttctttttttatgatatgcctttttctggttttggtatcagggtgatactggcttcatagaatgagttaaggaggattccctttttctcagtcttttagagtagtttcagtaggcttggtaccaattcttctttgaatgtctggtagaatttggctgtgatctgtctgggttttttagtcagcatttttttttcttacttatacaatctcactgcttgttattggtctgtaaggatacctatttcttcctggtttaagctagtagggttgtatgtttcccggaatctatctattttctttacttttatttttatgtgcatagaggttacatagtagtctcaaatgatcttttatatttctgtgatattggttaaaatgtttccattttcatttctaattgagctaatttaaacttctatcttcttaattgttctaatgttctaactaattgttagaacagttgttaattgttctaacaatcttaattgttctaactaatgatctattttatttctattttcaaataaccaaattttgtttcattaaacttttgtatttttatttcaatttcatttagttctgctttaatctttcttttcttctcctggctttaagtatgatttgttgtttctatagtttcttgaggtatgacattatgttgtgaatttgtaatttttcagacttttttatgtaggtgttcagtgctagaaactttccttttagcattgtttttgctatgtcccagaggttttgataacttgtgtcactataatcatccatttaaagaattttttaatttatttcttcatttcattgttaacccaataatcattaagaagcagattgttcaatttccaggtaattatatagttttaagggttccttttggagctcatttctagttttatttcactgtgacctgagaagatactttatataattttgactttttaaaatttattgagatttgtttttgtggcctatcctatggtctgtcttggaggctgttctatgtgttgatgagaagaatgtgaattctgcagtttttgggtacaatgttctgtaaacatctgttaggtccatttcttctggactgcaacttaagtccagtgctttttgttgttgttgacttcctgcttcagtgatctgtctagtgctgtcagtggagtgttagagttcctcactattattgtgttgctgtctattccttttcttaggtctagtagtaattgttttataaatgtaggagctccagtgtcatgtgcatacttatgtagaattattatattttgttgaattaattatttaattattatgtaatgactttctttgttttttttttactattgttgctttaaagtctactttatctgatataactacacctgcttgcttttggtttccatttgcattgaatatctttctccacccccttaccttgaatctatgagaatctttgtatgttaggtgagtttcttgaagacagcagatatttgatttgtgattttttttaaatcaactctgccattctgtatcttttaagtggagtatatagaccatttacagccaatgtcaattatgagacatgaagtggagttccagtcagtatgttgttacctagaaattttaggtttttttttttttcactttgttattgctttataggctctataagttttatactttcaagacgtctattctgatgcagctcaaccttttgtttcaagatttagcatttattgtaggactggtctgatagggacagattccctcagcatttgcttgtctgtggaagacattatttctctttcatttatgagactcagttttgctggatacaaaatttttgactaatagttattttgtctaaggatattaaagataagcctaaagatagagtgaacttctgggctgtaagatttctgctgagaagtctgctgttagtctaataggttttcctttataggttacttgatacttttgtctcactgttcttagaattcatttcttcatgttgactttagatagcctgattactatatggctttgtaatgtcagttttgcagtgaacctccccagagctcatggagtttcttgtatttggacatctaaatatctagcaaggctagcaaagttttcttcaattatgtcctcaaataagtattctaaaggttttgctgtttcttctccctcaagaacagcaattgctatatttggccattttacataatcagctatttctaagagactttgcttatttctttgaattctttttctggcatttcaaagatttcatcttggttgggatccattgctggggacttagtgtgttctttttgaggtgttatagaaccctattttgtcctattgccagaattatttttctggtttcttctcatttgggtagagtatatcttctaattacttttgagactatgtcttctaattatttttgaatttattttttgacttgactgtgatttttcactttttttttcactttgaggatttgactttaatgtttatagtttattgtaacctaattcagctctgcgtgctttcaggggtgaagactgtataagttccctggttatttaaaatctttgtatggtggctttctcagatgctagttgtggtaacattatgctcagtgtgtgtgtgtggaggttcactgtttcctgtggggtagcaatggcagaggtctcatgaagcttatctagttcccaagttgtgtgcacttttttgcctttttttttctcccagtgttttctttacctggttgaataattcagatttcaggccagtaggggtggtgtccctgagtgaaaaccagcagattggtaaatgcaatacccaatggtgggaagaagtccaagccttgaccgaggcatctctgggagctcttagtgaaatgcaccgaggtcttttcacggggaagggagggagccacttcagctcccttgccaggcccccaggaaagcaggtcacactcctaaatacagttctagctattcagattagcaggccctttttatttgcaggaattctgacgttccaagtagagagagattgtgattctatgccttatgcaaatctgaatctggaggggactcctcctctggggatgcagttaacttgaggtgttccagaaaggctatctacaggtccactcatgctaaattcccataagagaagtaccagctgtgtctgcagcagtgaatgaggggggaaagtctttttcttcaagaccgttctgcagattttcccaagtacagcactgtacctgtgcctctactgaaagaaactttccacaggtcggatgttctggactcaaggcctgccatctagattcttttttccatggggtgtgccactgatgtgcactcccccttatcctaagagtaggagtccctgagggccagactagtatgaatgctgctacttctctggctctagccacctagtgggactgccacactccaggttggtgctggggaatgtctacaaggggtccagtaatgtgacctgttctcaaggctccgtagtgagtagcaacaacagctctcatgggggtgacaggagaatgacacagactctgtgagatttcttgattataagtagtcttggtgcattggtttttctgtaatgctacctgtagtagtaatgaactggtcacatggacagactcaggacctcctagttagccaaggttatataggcaaaggtgatagcttaggtcacacacaagttttctctttcctgtgcactgttagtgtgcctgcagatgctgtaatggattgtgtcagtaggcttccagccacaaggtggcacttgaaaaagagcaccagctggtagcagtgggatttgtgcttgccttatgttacccaggggaggtaatctgatgactcaggcaatgggcagggccattgagctctcaaaattttctattctttgtgttaagctaccagggcagatggaggggcaaagccagctgggggctgaatcaggcaagttcacattctggctctcttttgtctgccatgtgtgggcaaaagcagtgtcccaagtggggatcagatagtggtcctctggctgtaggagtaatgttgcagggagtaccacagctgcctctgctgcagagaagcatctgtatgaggaatagggagcagcaggcagcagttagccccactcagctcccatacacttggcaaagcaagtcttgcacctgcagcctcccactcacagcagcttggttccaagcagtcaacactcagaactcaacactgcccaagtccataagacttcccagaagagactgcaaccatggcttccaggtcacacctctcctagtcggcccatgaagcaggggcacccagctcttgcacctatggctgcagcacatttcccatctgccccatggttctgaccaagggggtttgtctccactcgagattatatcacgaatctcagttgagagcttctctcaacctgtgaccactgcctgagttacctggctgacttctgtgaggtcccctgtgaggtaggatcagggatggctttcctctgtcctgctgggcatgcacactaagcccgtccccatgctgctacttctcatatatgccccactgctcactaaatcagctccagtgctgggtgggattaaggcctttccctgtggcctggattgcttggttccccagtaggagtatatgtcctagaggcagtttacccctatctgacattctagggacttatagttttcctcctggctcatgatgtggacagcaacctgacacttctttcaaaaggtctgtgctttctttcagttttttcctgttaattttctgtgttgcttcttggaaaaaatttacaatgtgaatctccacacacaattctgtctttccaaataggagaggcatgctaacaatgactctaatctgccattttgagaaaaaaaaatactggaggtctttattatttttttaatactatagcccattctgagttttcattacaacctccactctagtattgtaactacttttcacaaacccttatctttggtagctggatttaattcattaattttaaaattttgataaaaattatgacttaattatattattatgtattttcatttgattatctaggtttatgaaactgactaaactagtaattatttgataatatgattatattctgccaattcactctacatgttccttggatatgttaataaacaatagaaacaagtccaactaaaatacatcacttattctgactcttgttttgaaaaataaaacctgacaaatcaaataaaagtaaatgaattattattcagacatccacttatggtttgggtatatattttgacagtccatgagaaaaattcctccaagggtcttcacttccagacataaaatcactttgttgtttttctaaaagctatttttaaaaaaatcagcatctttttaaattctcccatctataagttggcaaaaatatctgttgaggtttgtaagcaactttaacattttaaataataaatgtaatatttagggacaatttaatttagtgactcaaggcatctaatatttggtatcagtatatgaatattaacaaacatttagcccttttatttatagtattttttatagtaaaacaatttctactttctattatgcttcttgttctgtgatagtttactatttctgaaactttattttttacaaaatttcaagttgagtctaaaaaaattatattttgttgttttgaaaaatacatagcctaaaactttacatgctaacagttgagttttatcagtgttatttttactaaacctaatcactataaaatagctatatcttgtgtatgttaaaaatgtgaaataagatgagaatgtatttgctatacaattaattaaattatatgaattagtagcaactattaagatgctttgaatattcccttaggtggacgagaacatgtgagcaagtactagcacagtggtagatgctttgtaaattgctcttactttcctaatgattgacaggctaatagctaaataactaagatattataagcactttcttagaatttagagatccacttaaaagacaggttttcattaggaatttctgtactttatttcacatttccataaaaaaaatcctcattgcaagaaccactgcacctattatatgaaaaaacttaagagaaaacaatcaggtgaccattacctctaaaacatctgatttgatttagttatcctataggaatcaagtatcaggctttacaagatcctcttttttcaatgttgttttactgactaaaacaatgtttaacatgactaattcacgtttctttttgtgatttatttttacttgatctaatttctaaagtgatctttatgaggtgtcttgcctaaaaatttgcctatacttataaatgcattttcacttactacaacctcattttttactgtactatagatgtacagttagttgaatgcatacataataattttgagaatatatgaggttttacataagaagaatcatattgaagtggttatctagcatatctaaagaggaaacaacagagaagcaagctggaaacaatatgtagacatcagtaattattttaatttcacaagacaaacatttatcaatcctgtattcaaaacctacatatatgctacttaggatgcagaaatagctatgtatattcattgccaccaagtcatttatgatccaattgaagggcaaatacaaacacaatgaagtttctttgtgtagcaattacacaaataaaactttataagcttgccaagaaaagcaagaacgaagaaaggaaagaaggaagaaaaacaaatagcaaaacagagcaatatttaaatgtggttatgattcagccaaccattacatttaatgataatgtgcctgtttgggaaagaaaatagaagaattaactgaatgccaaggggagggggaaggaacacaagaaaaaatcaaaacaaaataaaactgtgaaagataattaatgggaatagaaaaattatgtacaaaaatcattttatttggagagtaatttaggagatctttaggaatatattggctatattcaagttcctatacttaagtgctacacaataataattaaaggtaccagatttagtaaagggattttgcaccatgaattttttttcctgtaaagatacaaatatatctccttagtagaacagataacctcacagatttatgacactgttatatatcaatctatatttatttatttaaccaagcaatcttaatgttattttgctaaattgcttctaaatgtcccagtttctcagattccctttgtgtcatttaaaacatctatttgttatttattaattcaagttaatatctttaaaacctattcattttatatttgtctgagagctatgattttaagcttctaaaaattatattttaatagaaatcagggactagttacctttaatctgggggagatactacgtattttaaagcctgaagtcaatgtctagacaaaagtttctgcttaacatcaaagggtatgcaacatttgctgtggctctcaaatattaagaaaggaaaacataactgggaatttgtcactagcactttattctttactcaggattgaagtagaattttataacaccaatattttttagaaactttaaacattagaaataaaataaaaactagcccaattccaatattccccatggatttcctagcagaagaaatgtgaaactgttatggagaaataatccaatactgcaaacacaaggatttgccactacagaaactaacaagttaaattgaaaactatattaaaaataaattcacaaacaaaaattacaaaatacacaatgaaaaataatatacatgccaggcgcggtggctcacgcccgtaatcccaacaatttcggaggctgaggcgggtggatcacctgaggtcaggagttcaagaccagctaggccaacatggcaaaaccccgtctctactaaaaatacaaaaaattggccaggcatggtggcaggtgcctataatcccagatatttgggaggctgaaataggagaattgcttgaacctgggaggtggaagttgcagcgagctgatattgcaccattgcaacccagcttgggcaacaaagtgagactctgtctcaaaaaaaaaaaaaataccaacaataagagtcagcagatgtaaaacagcagaattaaaagtatgtgtaaaaatagatgaataatttgaaaaaaattataaaattaataatatgtaatgaacatatataaacactaaagacatttaaaaagaaatgaagagcagatttggcaaaggatatccaaaaataaaaatatagtaattgaatttaaaaacctatgagatatggatgattaaaattagtataataaatatatatcacagagaaataaagttatcaacatagagcaagacggacaaaaaatattattatattagataatttgagtgcatttaagatggtattgaggcaatatctagaggtaataactggaaattttctgtaagtcattaaagaaaaaaaattttcacattcaggaattggacaatttctgaacagaattgataaaaataaatccaaactagaaagaacactgatttggtgaatattttaaaaagaagctagttcactgaaaaactaatacaatactgcaatggcataccaagttccaaatgcaaaatatacagtgcaagatagaatactatacacagcgctgagactttttgggtctacaaaattttaagaaagcacactcatggattcattgaacaactgtttttaaagtaacaaagaaagaaaaaagaaaacactaaaaaagacaagtgtgagaagcaagtggcaactgtaaacctgttaaatgtaagggtaaatctaaataagcattaattatttaaaaatgtgaggtcaggagtccagtcccacctgggtaacaaagtgaggcatgagttacaattaaaatactagaaaagtattgaccatttcaattaaatgtttctttcaaatcactaattattttcatgttccaaaatataaaggttaattttttattctcattttattgatctatcagtagtctctttttctttaattaaaaaacaaacaaacaaaaacacataaacaaacaaacaaacaaaaccagtttttttctttggcttccagaacacgtcctcttggctttcttcttatgtctttgtatgctatttcttagtctttggaacacttctgtgtccacccccactcccttgatgagttgtcacagagccatggtttacaatattgtttatgctaagaacttgcaaatttgtacctctacctcttacttctcttctaaatgccaggctcttacatccaacttcttatgctgtcttcttttgagaagctaataaatatctcaactttgaaatgcacattctcaccaacgaccatttgtctcagagcaaaaatcttagagtcaatcctgcttattttctttgtcaagaattgcacatccaacctttcagcgagtcttgctgcttgctctaccttcagaatctatccaaagttagtcactctcttagtctctcccagaaacagatcccagtaaaaacattcaatcagaagtaatttgggatgtagagaaaaactgtattctttttcttccctcagccttttgatgtgtttatttcaatgctatttttacaatgttacttactgaatacattaattaaaattgtaatctgccactattactgtgtatcctgccttactttattttcttcacaaaatatataacttttcaacacctgtctatattttatttcttttgtgtcatcctatatctgactgtaatctttacaaaggcaaggatttttttctttaatatcctaaatgtagatgtttgtctctagtagattcaatggtgcctcccaaaatatgataaatatgcacatatctttccatatgctagcccacagaaactgtagatgtgacctaatttttttgtatatattaataaggatcttgagatgacatcatactggatgatcctagtgcaccctaaatccaataagtgttcttatgaaagacagaagaggagaagatacagaaaatagaaggctatttgaggatggaagcagagcttggagttatgcagctacaaaccaaagaatgccttgaaccaccagcagctgaaagaggtaaagtaggatccacccataaacacttgagaaggaaagtgggcctacctataccttgatttcagatttctgccctacagaactgtaagagaatatatttctgttgctttaaacatttacgtttgtggtaatttgttataacagatccagcaaactcatatactggcactgagcagatattcaataagaattgattatgaattatagtcattatgatagtgtggcattgactcagagatgaacaatttgttcactggactatagcaggaaattcaaaaattcatggacgacttttgatattttacatatgaattgtcatgtcacccagaaaaatgaataactattcataacatagcagtgatgcatttgattaacatatagaaaaattgtaaattgtattctaacatcacattaacttcaaatgtgaaagatatcttgtatcacttttaaagaaaatataaaatatattttatttagtaaaattgaatttgtagaatgatgacttttttttttactttactgcttaatacttgagaaattttcctctttgatgaggctgttagaaaacaggaactctaacaattatatagtgggaagataaattcatacaacgactttggaaagctacttgacaatgtaaggatgaaagtgcccaaagttgtaaaatttccctgctctatgtctatcctatgaaaattctaatatatataaacaacaaaaccataaatatttattgtagctttgtttttaacatttacaatggtaaatataaaaatgccaacatttcctgatatgaaaattgatagctttatattatatatataatgaaatcccatatagaaattaaacaaaaacggatacccaagtatcagctgcaatggttctcaaaaatatcatagtgagattataaagcatgtgttgaaataatacagataaaacaataacatcttatttaaatttgaagatacaaacactaccgtatgcgttataaaatattctatacacagacctgtacttaaaaatagagaaatatacaaggggatgctaaacaattttagcctgtagttatcccttgtagaatttcttataatcttgtttctggttatgttgctgtatcaattatttttcatgtttgggtatgtgtgaaatatttcataaaaggaagttggacgttttaataatacattgactttaacaggaggaagaacaggtgattggggtattttgttgtataccaacacatgactgaaataatcatctattctaattctgttcagttcagtggaaagtctttgaaggttttttaacagagttgcagtttgtcatatctttgagaacattgtgttagattaagtggaacagaaatgcttagagggaaggagattaaaataatgtgttgtatggatatttgaggtgacatacaatagaactggaaaatagagaaacttcatgaaaaatagtataaaaagagacataaatgacttaccaattgactctgctgtgtttgatagatgggaattgtagtcgtaacattggatgaaataggaaagacagactagtagagctctttggaggcaagttctataagttctttttacattttgagtggaagttttcacttttaaatgaaatgcatatggataaaaaataaaggtaaatatagttattatgaaattgtcaacataaaatgagagttgatgcataaaaatgaacagactggaaaaagggaactttttaaatataaaaaaaattgcttcttttctgatagtattctttcttcttaaacttcatgattattcctggaaattaaagtgaaaaaaactatcataaaactatgactctatcatactgtaacatttcagggcccacattattatacctcctctctccatcttgcatgactgtttaaaatggttctgtttgatacactgacactcaatttctttttatatggaatgtaatttgggagattctctaaacaatctgtataatggcagacatggagtacaactgaaattagaaatattctgttgtagtttccattctttcttaaaggttttaacattttgttatgaacatgacaagccttatttttttttccacacatagaaggaacacgaattataaatagaacaaaacactgtgaaatactgcaaatgtagaataattatttgatctcatgcacacacctcggtaatttaaattaaattctataagttaatgactaaatattttaaaattaactactttaaattaagatgtatttagaaataattttaatgttattgaaatttttttaaaaaacctattgtaacataagaaatcatgatataatgcaaatactacatattttcagaaaatttggtaatgaatatcaactcccaaaaaaccatcttagtcattgcataaaattctacaaatgatatctgattttaatttagaggaaagtacatgaactgaaagtcccaactgaataaatgcttaaaaaaggatgatttaaaaaaaattaaaggtaacatttattaattaaaataattctgatagaaaatcctaacaatgtacattattgtctagatttataattccgtaaattaaatatacatccccctgcaagtggcaatacttcaaaaattaattctagtttacaatttagtataaaataatgtattaaaagtgtccctgaaagatggagtttaatggagaaaaatgaggaatattatgagtatcaggacatggagaagagtaaaaagtcaatattgtgggacaaattaaatgacataaaaaatcaccttttttcatttgatataatgtaatggttataaaatatcttctcaagagttcttcaactgtcatttcattgagatgtggggactggggtctctgaccttgaatctggggggacttttaacttctttgactaagagaatacaaaaaaaagcaatgctgtgtaacttttgagacctggcctaaatcgacaatctgacttctgctcactttttttcagaatcctccatctcaggagggccccagtattgccaggctgggagaaacccaaaccatgaggatagaccatgaataggagttctggttgacaatcccagttcattcctagcttcaaatacacaaggccaagtgccagatatgggcataaaaagcaatttggaagtggacactccagtcccagctgtcctagccctcagctatttgagttgcattcagacatgtaaatcttcccagctgaggcctcatcattgaggtgcagaaaaggggcatgcccactgtgcctgtttctaaattcctgacccacagaacctgtgagcataatacaagtttactattttataccagtaagtttggggtatagtattatgcaacaatacaagctgatgcacaaaaaatatcttctttgttgcataaactctatataaactggcatatgcttagttcttaaacctctctccaatctccttctctttccccatactcaaactaatcttttttttctgctccttcaacaaaccagcacttgtatttacacattagataaattgcaccattaacttaaaaaacacaatttccaagatttttacaatactgtgtcttatagtttaaagtatctcagcctttaagtatcacttgttagataacatttagttgccaatctttttataattgctttctcttactctactccttagcttacagtcctttctgccatatttatcgtatttgtataacagatcaaaatctgtggttatctatttatttacctaattttcagctctctccacttattatcatataagttacaaacatttcaggtcatatcttcagtttaccacactataccagtagcttaaatatcacattacccatactagccactcaaaaatatttattatggaattaatggaactctaaatttaatctggtctccaaactaaatatatggcataagtatcaatataggtttcaggtagatagggtttagctataaggaatacagggtgcaactaaaagcagttttcacaggcaagatgtttacttacttctacaaaagaaagagtacaagccaggacaggataagaagagcagccacacagggacgctgaagatttgttatacacatgtagggacattaatagcatttccttagaaagaggtatgatataagatagcatgatgcctgtagcaccctgagtcatgattgctcatattgcagccaagaaaaataggaaaggctgaagcagcaaagggcaaaggggcaaaaggccaaagccatgcaggccaagtttgtgcttttttaaaggctttcctaggaacctatcttatgatatccatttcaatgtcacaaaattcacatggccacaccaagaaacatggatattttactttccaaataaaaaactaggcaagagaagtttacatttgcatagcctatcaatagtgtctgccaagatatttccattttttagtgtatcagaaaattgggcacacatgactaacgtactttattcattttaaatagaaacaaatgtgtgtgcatatatatataaaagatacatatttatatgtgtgtaaatatgtgtgcgtgtatgtgtgtgtgtgtgtaaaaccaatcaacttctgcttaaaaacttctgtaaaactcatttttttttccagtatgtttcctctgaaggcaatcttcacatctagggaatattaatggtaataataacagcattgatttattgagagttttcctatgtaacaattactatacaagtatgccatttaatctatttctctagtttcaatattaatattggtacttaataaatgagtaaactgaaaataataagtttaaaatcttttttcacagctagtcagcaatacaactaggatttgatatcagattcatacaattccgaagaccctgaccactaaatgcaaaaggtacatggcaacagctgattgcaatgagagaaaaacaactaataaggcaacaagcaggatactaagatattttccaaaatgaatagcactgattctgtgaggaatgaacattgccaaacaagtgttttgttttgtttttcaactcctctaaaaaattcacatatatgcatgccactttcctgaaaaatatctgcttcataattgccataagaaactgtatggacaactcttaaacattctgaaagtagtcagggatgggggaaagcatttgctgttttagtctgttcctggtcttataataaatatcacagactgggtaatttatgattatagaaatgtatttctgaaagttcaggagttgggaagttcaagattatggcaccaacatattcattgtctgatgagggcctgtttcatagatgtcattttgcatgacttaatcatatggtaggaaaagcaaagggacaaaatggacaaatgccatgttgtcacatggcagaagaaatggaagagccaggaagctctcagaagcttcctttattaggatattaatctcattcatgagtgcacagccattatgacttaattgcctccaaaggccccacttcctcatcactttgaggattaaacttaaacatgaatttggaggaaatatattcaaactctaggactagtttaaatgtagctaaaaaggtttcttcattctgtaatcgttaatatgctaatatttttgtaaatatccaagaggaagctaaagcatataatattccaaaatttatttgtttgtggatattatgttttcctctcattcaatctcaagaaattagtgtcctcaagaaacactatataggataattgtctttcaagttcatcaactaccggttcttgattcttcagtagctaatcctagatagtaatacttaacagattataaaaacttgggtgctgctatataaatgcgctgaaactcccagggaaccaaacataaggacttaaagagagatgtaactagggatcataatcatgaatttcagctgcttctctatctttgtcagtgagcaaatgaccatacaaaataaggtattcaattattaattctgtgcccatatcccggaattttgcccaatatatttgtaagtttagataaataaggcactaatgccagggatatgtagcattagttctgggtttataaagggatattcacaacctcttgccatccacagaatttatcagcccaaagtaaactatactcgtttgttaagggcaacctgaaacatgtttaaaactgaggtagactgaagagtcaactaattgcaggaatcttttgttatttggttgaaatgttcaaacaagtcccactctgaattctattagaagtccatcattggcttctctctctttctcactgtcttaaatcatgtattttataacactatgaagaatgaagttcaaaagaataagctaaatttaattaattaaattatttatttatttattttgggacagagtctcactctgtcacccaggccagagttcagttgcacgatcctggctcaccgcatccttcacctcctgggctcgagatcctcctgaagcagggcatttccctgaccccttcatgggactcgtgacaggggtgccccatttactcagcccactgctctcaactcctcaagggagggagtgtgtaattgaataaggcaggaactggagtacatgagtgctggaaccagtggcctctttggtgccagaaggagtgaactcacccactctgacctgctgtgttccacctcttgcaggagagagcatgcaggtgagcaggtataggagccaggaagagagctctggggtgttggcaggagcaaactccatgtgggcctcatagcagcccctggtgttagggggggtgcctgtgattcctgaagccccagtgggcatattacagtgctcctttagctctgccatcttcagacagctgaagtgttagcagctcagcatgcctttttgtatccacactcactcctgagctcttgtttggcatccaggaaaaatcagctcacagaaacgaattgaaggatggtaaatgcagaggattttattgccaaggaaagtggctctcagcaggaagggcagctgggaaggacatgtagcaggaaggtttctggctggactcttctccaaagttgcactgtcaaactgtctctctgaaatcaagctgcttctctccaacgtccaaccatagtctctgatgcctagctgctgcttctcttttgatgttcagctgcttctcttttttgctagctgagtctggggtttttatgggcacaggatggggaacaggggaggtcatgggtaattttgtaaaaggcaacatttgagtgggaaaacaggaacgtatgttctcactttgggctttggttccaggcttgagggtggagcccttgccagggacctgccctcttttgcccagaatttccctgcctcccttccctatcactcccaccccatcactcccacctcaacatcctgagtagctgggattataggcgcacaccaccacatctgattaatatttaaattttttgtagagacagggttttgtcatgttgcccaggctggtctcaaaccctgggctcaagtgatttgcccacctcagcctcccaaagttctgggattacagatgtgagccagtgtgcctggccctaaataatatttatatgggcattttgtaattattattttttaataatataaatgtttcctttttaatatgaatttttcaagagttttaaaattgactgattattcattaaaatttaatgaaggacaggaattggctatttttctgaatgacaaaaattaggaaatttttagagagatgatgaatttatcctagaatatatggaaagagtaaatcttgttatatagaaaaagctactttccaatccgaaggatcttagaataataaattttttttttctagtttccttataattgtttcaaagtaatactttagaccaaaaattgtatatctcagtaggtggcctatatgataattaaaaaattaaaagctaagttaattaaatttttaattattttaatttttattaattttaattatcaatcttcattgaagaattttgtccaaaaaatgtggacaatatgtgtcataaggattaatcagcataaaatagtccccaaaggaaattaaaggaccgattagatagtactaaaataacaatcatacaaagtagaaagtggtgttataagagaaatgtagataaaatattgtaagaaactaaagcaggaagataatggtttgagttgtgggagatcagggaagattttttggaaaaagtaacgtttaagctagatcttagagagacatgacttaatagaaaagtaggcaaaaaaatatgaataaccctttcagattacaggcaatacaaattatgataaatataaaaaaattcttactttactagtaatcaagtaattgaattaaacaattggataccaatttttcttcagcagactggcaaaacataagatgttaacaagggttttgagggtacagggaagagggtaggctcaaactatgctggtatcaatgtataaccaagatctcctttggaatacaattgttatatagtctacattctgtaaaaactaaacacatatgtttgcctttccacttttggaaatacatggtagataatcatgcaagaatgtcaattgcagtattgtgttgtaatttttaaaaatactcaaaatatttatcaatatataactacaaataaaaatagttggactatcatgcagactacaatgcctctattgtggcataatagttaataatacaatctctgagagcagaatatctggatttgaataatttgctctccctctaaatgaccttgagcaaagtacttacaatctttttctctcttctgtaaaatggagataacagcattgccaatttattagcttgtcatgatgattaaatgagataatccatatatcacaccaagtacccactacataataagcaactaattaaatttgactaatattaataatttcattattattcatcttaatatcatggcatgacttctaaggtatattattaaatagaaaaagagaagttttaaactgagccatagtttagaacttgacttaaagcagactcacaaagcaaatgctcatatctaggacaggtaaatctacacgtgtttatacacacattcactgtgtttggggaaaatacacaccaaactggaaacactggttgtctctgaagaagagacagggctttggcaatattcaaattaggctttaactgtttctgaaagtttcagttctctataaggagaaggtattacttatgtaatttttaaaaattacatattaagtactaaatgactgaagcttcttagaattgatgggggcaggcatcacatgggcagcaaggcattcacataatggagaatcatggtctcctgtagatgtctaggagtgataaaattaactaccttttaggtggtgtagtttcctggttgagctgataattattaagttaatgattagtaggttatttctcaacactgaagagattattagtgtttcaaagttttcactgtaattcatctgtaaaaccattcaacctacctccagtacacctcagtaatctggtgacaagagagtattcttgcacactttatttcctcttcagtgatctaatgccaataatgccagcctatagaaacaacagccaattataacaaaaagcacattaaaaagtcaaatatagctgagtaatagacataaaaataccttattaacatttttgtaacactctcaactgaaataaacagaccactctcgattttagcatctggttccaaacaattcttgtttgggtgataactttttaaaaacaaatgctgggcatctttcatcgacttttcatcaagtaacagctgttcctttagaacaaaatgtatgcatgttggaagggtgactgatgctcacttctgttttgttctgtgtgagaaagctttatgttgggtgcaattcagaaaacaaatggtttcaaatcttttgaatagatgccatagcacagtttaaatgcagcttcttgtgatttttagaataatttcagccacaatttttacattcaatttataactatactaagacattctccttcagaacaaaggcatttctgttttcatgtgctcttgggcatcttcgggtcattcattatatcaatcatttatcttcgtaaagtgtttggctatgaacaattacttactacaccaaaacatgaaagaaatagatatagctcatctgctcttgaatgcatttctacagattcccttaggataattcctgtttcaacttaagctattaaattttttgctgaattcaaatcacctaatctgctgaaacatgtggagacaaataaccacagacgtttgcatgaaggttcaggtgtatttaagggcagcttaattataagacactatgaaattctcctaattaatttggagctaaatattctacatcaaatattttacaaaacttaaagaaatatttacttttcacatgattacgattttgatactaggttaaaaatgacttatattggcattttttaaacagtttaagacaaataatgtttttgatactgtttattataacatatgaaaagtctttatatttatgcaaatatactctattttattgtctgttcatttcatgttgcatttgcatgcactcctgaattacttgttactaaaacatacagaacagacagaaagttaaaattggttaatttctatctaatctggataagataaacacaatgagtgaaataaatcattatgtcaaataacaaaaacctcatgcatagaaacttcaacatttctgaataacaaaaagtataacattatgtagggcaaggtgccacttttgtatcaactagaaataagccctgaatctgaatgatgaaattttaatagtaactgttgaccgcagggcagagtttactctcttggtcagatgcttttgtgaatgacacagtgtgtccagatcacttttccctataatcacttcaaattacttgactttttgatctgttccttttttctgtctcttttttgtccacaacagatattccaaatatccaccgagttttcaaatactccagtccataattggtcttcccattcctagcagaagtactttgtcttctacttcccagaataatgttaattctcttattttagacttgcttgctttaatttgtatttgttcttggctttttttctttccatctcacaggataagagggcatctcttcttccatattcataaatacgttgccaacaggaatttgttgttatttacactttcttctcctagacattttaattttacttaccttccctgagcacatggcaaagtcaaaacacaagcagaatcttacttatgaatagaggcagatttattaagccaggggtaggcaaactatagccaataagccaaagccaggctgccacgggtttttataaataaaattttataggaactcagccacagacattcctttacatattgcctacagctgcttaagcactacaaaggcaaagttgcatatttacaacacaaatcatatggcctgcaagcctaaagtatctactatcgtgccctttatagaaaatgtttatcagcttttgttctcttatcctaagttatgaggcttacatttctggccacctcatttgcatttgagtttccagttttgagtttgttgttttgtattcttgcttaaagagccccaaaccctgacctccaaattgaatgtgctgtagatcccacaaaatatggatccaatcaagctgatgccatgtcattatctgtagcttttattctttgccatcacacaccttccttgaacagttaggcttctgcaaaaaatcttaaataatcactgatatgggttggttctgtgtcttcacccaaatctcatcttgtagctcccataatttccacgtgttatgggaaggatccagtgggagatgactgaatcatgagggcacgtatgtcccatgctgttcctgtgatagtgaatggatctcaggagatctgatggtgttaaaaatgggagtttctccacacaatctcttttttgcctgctgccatccatgtaagatgtagcttactccttcttgccttccaccatgattatgatgcctctccagccatgtggaactgtaagtccaacaaaccactttctttcgtaaattgcccagttgcaggtatgtttttatcagcagcatgaaaatgaactaatacagtaaattgttaccagtagagtggggtgctggtggaaacatatccaaaaatatggaagcgacattggaactgggtaacaagcagaggttggaacagtttggaggactcagaagaagacaggaaaatgtggccaagtttggaacttcctagagacttgctgaatggctttgaacaaaatgctgacagtgatatggacaatgaaatccaggctgaagtggtctcagctggtgataaggaacttgttgggaaccggagtaaaggtgaatcttgctatgttttaccaaagacactggtggcattttgcccagccctatagatttgtagaactttgaacttgagagagatgatttagggtatctggcagaagaaatttctaagcaggaaagcacttaaaatgtgaattcggtgctgttgaaggcattcagttttataagggaagcagagcataaaaacttggaaaatttgcagcctgacaatgcaatagaaaagaaaatcccattttctgaggagaaatccaagccagctacggacatttgcataacataacggggaaaatgtctccaggacatgtcaaaggtctttacctcagcctctcccatcacaggcacagagacctaggaggaagaagtggttttgtgggctgggcccagggttcctttgctgtgtgcagcctagggacttcatcccctgcatcacagcaactctagctatggctgaaaggggacaacatagagctcaggctatggcttcagagggtgcaagccccaagctttggcatcttccatttggtgttgatcctacgagtgcacagaagtcaaaaattgaggtttgggaacctctgcctagatttcagaagatgtatggaaacgcctgaatgccgaggcaggagtttgccatatgggtggggtcctcatggagaacctctgctagggcagtgcagaaggaaaatgtggggagggagcccccacacagaatccctactggggcaccacctagtggagctgtgagaagagggccaccgtcttccagaccccagaagtgtagatcctctgacagcttgcaccgtgtgcatggaaaagctgcagacacttaacaccagcccatgaagacagccaggagggagactgtaccctgcagagccagaggggtggaactgcccaagaccatgggtatccacctcttgcatcagcgtgacctagatgtgagacatggagtcaaaggagctttagatttgactgcccttctggatttcagaattgcatggggcttgtagcctctttgttttggccaatttctcccatttgcaatgggtgcatttacccaatccccttacccctgtaaccccattgtatctaggaagtaactaacttggttttgattttacagggtcataggtggaagggacttgccttgtctcagatgaaactttggactgtggacttttgagttaatgctaaaaagagttgacattttgggggactgttgggaaggcatgactggttttgaaacatgcagatatgagatttgggaggggctggagtgaaatgatatggtttggctctgtgtccccatccaaatctcatcttgtagctcccataatttctatatgtagtgggagggacctgatgggagaagactgaatcatgggggcaggtctttcccatgctgttctcataatagtgaatgggtctcacaagatctagtggtgttaaaaacaggattttctctgcacaagctctttttttgcctgctgccacccacataagatgtgtcttgctcctttttgccatgattgtgagtcctccccagccatgtggaactgtatgtccaataaacctttttcttttgtaagttgtccagtcgtgggtatgtctttatcagcagtgttaaaatggactaatacaatcactctatcaaatgagataatatttattcctttaccactgacaactctctctcttggctcttctattcaatcatgttactgatagacgctttgctttttgtttttgttgtttaacctgattgttataggttattttatgaatttctgttcttcttttaattttacaacaattttactatttctccttacatgtttataagtcatatggagactacttctcatctacccttaccccagaatattaaaacttttcagagtttcaggattaattccattatatggacatgattccttgagataggaaaaactgattggattgtgacattagacttatcagaatctaagatcttacaaaatataaagctttactagtaatctcatgaactcagttaatcattaggcatgggcaaatcagagaattatttagatctcttaatctgattctttagatccttggttctgtcattagatactcccttgcccaggcagatagatgagacttctagagaggtatgccgacaatttatttacatggagatacctgtctcaattatcaaatatcttcatttttatgcagatagttacatatgtggtatatgtgacattttccagggagccccataaatccacaaccttctactttgttaaccataagcaattctaaacgaccaagtacattctgctaaaagcgtttctgtgatagataatcactctcctgctagcaaaaaaacaaattgtttgtcaggagctgtcattagtatgtttatataagcaaaatgggcttccttccttctgtggatcctggcagggcatctcagtaatcagaaagaatcaaagaccctttccttcccaatctgctctggccttggtcaacatcttagtgccaaatattgctggtgtattatcattattggcttacaccattttctgcagtgtttcacttaagccaactaatactctgaccttgatttgaaccatccaacagagagtaggaattccctccacaaagcaatgttactcattaacatcttcctttacaagtctcttgatgttcattcacagactcaattacctttttcctccatcaacctcaattatttgcatcattttccactggcctatgggagtatttaattgaatacatattttttctcaaatcaaattttctgaaaaaaatttgtttctatgaactgtattttaggtatattccaggttggtacaaacactaattttcaggggtcattatgtcaaagagcccatccacaccccatggcctacatatgtcaaaggattgttctttattcatccactttctatgaattccacacacgggagataaacttctttttcatccatattaccagggttgtcagggagcaacattaaaggtcacagtgttcggtgaaaccttgccataacttagactaaacacgtttctcccataattttacttcttcaaattctttctttttctttctttctttctttctttctttttctttctttctttctttctttctttctttctttctttctttttctttctttctttctttctttctttctttctttctttctttccttccttccttcgttctttctttctttctttctttctttctttctttctttctttctctttctttctttctccttttctttctctctctctctttctctttctttctttttctttctttttttttttttgacagggtttcactcttgtcacctgcctggagtgcagtggcacaatcttggctcactgcaaccttcacctcccaggttcaagcaattctcctgccttagcttcctgagtagctgggattaaaagcacctgccaccatgcctggctaatttttgtatttttagtagagacggggtttcgccatgttgaccaggcttgtcttgaactcctgacctcaggtgatccacactcctcagcctccctaaatgctgggattttacaagtgtgagccactgagcccgacgttgagcttgtttctttatgaattcctgcaactcaacattaaagacataatatcccatagtgattaatatatccaatagtccttcctgactaaaggtacaaagttaatcctagtgttgttaataagcatggaagtcattatttattcagtgtcttcggttcaagcattgtcttaaaccaaactgatttcctactgcaactgagtcctctaaaaacagcttcctctagtgtccctatttgaagtagcaagtcatttttatcttaatgatgggcctcctagaacactacttcaattagatttaatatcacatgaccaaatcctgtaattctttcaaaatgcctggcaaaggggccagtgctgcttaacttgccactcatgtagttcatattatgtgctaattaaatgtgtctagtttgaaagcattgtctacacctacaaataatgtgcttcatgaaattctctgttaggtatatcctagcaccagataccgttttatctggctgtgccataggcttcccttaaatgtcctctacgtacctcttgagggagttatttataattttaaagcattaaagcaaacataaaatcacattctctgaggctttctaggttctagttttatattatttaaattaattccatttacattcacactgatatgttcaaagcaacagaccagatcaagctgtgacataccagacaggcagccactatctgctttctatcatgaccagggagctgtcttagcaatgtatcattttgatttatggccatatagggtgcagaaattctattctacagcatcctctgctctgtacaattcattggtagtttctctggaaaaaaataatctagaatggtaaacaaagcctagaaactgagtgataactgtagtcaactacacacaagctgagttgtcagggggcactttgtcatttgttttattcagattatacagttagaacatccaaatcagtaggagtccaattttccttttctgcagtaagcaggccaagagattttcaccaacaaagcccatttgtttggatgacaatagcaaaagatagttaagtatgatatcctcactctgagctgtttgcgtgaaaatattgtagtggcttccctccacggtaatgtaatctacttataaacacctttcccatcttctatgattttaccctatttccaaacgcttcctcccaatatcaggctgtataactcatcatgcataatgtttgcccacacaatcaataacaagaaccttactagcacacccaaacaaatgtttgggttttatttgtttgtttgtttaacttttattttaagttcatggttacatgtgcagatttgttacacaggtaaacttgtgtcatgaggtttgttgtcaaacaaatgttataagtgatagacaaaggacctcagaagtctctcctctgttgataatggagctaccttcacctttagccctaattggttacataggaaggaacttttgatccaccacaaattacctttcagaaaaggcacagtcaaattaaatgacacaaatatcatgtcttgggtattgtataatcttcctctggtgcaagtaaatttaaaactgggtttgacaccaccattagaggccaaataaaagtattagaggtgggaaagatataaagttatatattattgcattctccttcactccctcattactacctcttgatattagtaaggcacagtggattttgtgatttatttctcatattagtctcaggacgcaatggtttcactaaaggaacccttaataatttttgagcaaggggccttgcttttcatttttcactgggttacagaagttatgtagctggtccttcctgttgacattggctgtgtcattcagtacaacagcatgtgtctttcaaatggattatagcaaacagctgccacaggcatattttgagtcaaaatcctgaggagtctaaattggtggtcccatttaactcttcctaaagggctctagtttggatatgccccaatatcatctgaccagttggatgggatcataagggcctaatgttattgcctgtgctaccacctaccacaatacttttcatgcttatttctattcagtacctgcagtgagttaaatggtgctcttctgaaattattattcattcagaatctcagaaggtgaccttctttagaaatttgcacatataatttgttaagatgagctcctactagattaaggagggtcctaattccaatgactggaggtgtttttataagaagagaggacacatggagaagaaattgaaaacgaaagcagaaattggagtaataaatctataagtaataaagctccaaaaatgtgtaggagagagtagaacctaggcaggggcaagaaaagatttttttctgtggcttttcaaggaagcttgaccctattgactccttggcttcagacttctagcctccagaactgtgaaataataaatttcagttgttttaagctacccagtttgtggtaatttgttccagcagccctaggaaagtactacaatgctgtattcacgttctgaactctttccagttattttgtgagtatgggtagacaagattcttagaacagtcttgacagtctctgagtttattgcttattggtgggtcctatgaaagataaattacttctcacagtttaaggaatgtcctaagttgatctgcactaatttacaggatttagttgcagtttaaggaacatcctaagttgatttgtactaatttccaggaattaatttgcaccttgggctgtgccttaaattctagctggatttatcacccagcttctatttgtaatatgggtgactatggtccttaaatcctctcctaatttttgctctgagaagaaaattatcatcataccatgaaagtagtagatgaactctatcttttaggttattctttaccagattatggaaatgtgataatgaattttttttaatccatgataagacagtaaacatgtacttgtttctattctgcaaagcttaaaattttcctacttgaaattaaaaaaaaaaaatcttaggaggcccctgagattggtttaatgctctgttgtagctatctcgaaattcttaataatttttgagtaagtatccatgcattttcattttatactcagctctatgaattatgtagttaatcttgatagcatatcagagcctcttgtctactttattttctgtacattcttcatcatatcaggtagagatgaagcatgcaaatgaaccaccttgatactctactgtaaatgtccaggggctacctacttattgaccagttagaactacaaaagggaagttaatgtggggaggggaacttccttctaaaccattttcttaattacaacagtagtctcttattgtgcccttggaattctgcattgcttaatatttactactgtggagagcttgagcaattccaaaggattccatttggcatggctaattaaaatttggtgaagagtgagctcagtcttcatcctctgtggaaacacaaagacgacaatgtcccattcatattgaatgacaattgcaattttgtatttatgtgaaggtagcacaagcaggtaatattctctccaaccacacatttcaacctgtaacgtcatctttaccttggtttcctccctgatgttctcttcatgcactccagatttcacttagagcatgtatgagactctttcctaccttccataaggcctactgtaaattctgctctgcatcctaccaatgataagaaactttgaataccaccccaggtaactttgttcaaattattacatatatggcctcagatccatgactggggctggaatgaacagacctcagttctttatttaattgttttcagattctatggctttaattaaggcagtaaactcagccccctgttcaagtatattctgttctatatcatatcctcataattggatttgaactctttcagccacaataaataaagcaaattttctatgattctttaagggattggtgggggctacagtactcctctgattcaaaagttgataatgtgcttttactttcttattaaaaattctatcaaggcttactttttaaatgctatttatattttcttcaaaagtaaattaattcatgtgagctgcctttctattttctcttctgatttttaatttctccctgttgtgcacatgatataaatgctttttctccatataatcccatgtatagtaactaaacctgtatgtttgttactgttctctgaatatatatatttggccctcaaggttatataagtcttgtaagacagagaatcattagcttatcccattcactctatctcttattatttgtatcaatagcattaactaaggtgttttctctctggaaaatataaagcctgtcaacctttacacttgtatcattcctatcatgtgaaaaggagaatccaattggcaatttggagaggagtagtagcagttacccttctcagtataggactgacaaatctcaccttaacaactgcagccgatatgctgtcacagtatttggaagtgttttctcaaaagtttacagccatttaatgattagtcatgaccatgaatagtcctttgcatcagataataatagaattgcaacatgtcctccatcattaatttgaagaatccatgccaatgttaattcaccagtcttctgttagtgaatattctgttctttaataaaatatagttttcactcatcacctgtccttggactctggttacataaatagtttgtcctataatcaatattttgagtcatttcaaaagatacaagaaatttctccaagaaaccagggagggataagaaggttttccagtgaataaaatgtaatctcgcagctttttctcccactatcatctcctcctattaaaaactaacctattaaaaggttagcttttacaggtatgctagcaggagtcagtcaatgggatttgcacccaatttccctttgtccatgtactccctagacccgtactcccagactgtagtctatggcccccagatttcaatggtaagacttatttcccttaacctgcctcaaagattccactacctcataccaaaaatgtacagccaactatcctgagaacaaattctcatatttttccattatttccttttgaaaaggagcccaggtagaaaaagaaaacattcactattttggtgtgtgggtctaaaagacaatcctgctctcagtgccaatctgaacccacaaaaagcattgaattgtcaaatcagactcagattgaagattttgctcagtatcatgctttttgaataatttcaaagataaaataatcatgtatgggttaagtggggagagacctgggtcctttcatcttcattgaatgtggtctcatccaagtttctagatttggtttctaagtaaaatgtacagttgctttacttactcaagtgtattctcagttacaaaccatctccttttatacttagacagcaacacagctaacgtgacattttcttgggaatcatcaccctacatttattgattcctggcttatttttcataagcaattttagacaactccgcatggtctgctagaaacattttatgaagaatgattctttggccaccaaaaactatttagtttattttctaagagacttgcattaatatgtttgcagaaaaattaaaccagaacacctgacttctttatttcccaggagttttcctccacacctgcccccatcaggggagaaaattgatcaggaggtaccacccctttccacaccattcttgaatctattctacagaactctctcacatggtctagcaatatgtttaaggtagaatgctttttctatcaatatttcttatgtgttaaatttgcattattatatattgactagaaattatatattcattcttaaacattaatcataatgaatctaaaaacctaatttatttcaacaaataaatttctctttaattcctgtcctcaacattcttttccttaatattcctattgttactgttacagttatgaaatcatcttaatgaaatcacagctagaccagtgcattaatttaaaacaatagcatcctttttctataacttcttcaaacttttcttcactgtcgtataatgataattactctaaaatgacaatctgatcattaaaactttaatcatttactctctgccaatttcataaatatttgattcacagttgttatttcttcttcaaaatacatcaaataatccacctttacgaaaagcaatttactgtttcataaatgtgctttattatgtcacatattcagtcttttaaacattttgtgccatccttggtcatcaaataaatttctatctactaaacatgactgacttagcaaaactatagccttagtttcatgcatgtctccatcaattttggaattgcttttatacccaaactgcagtgggagaaaaacacataaccaaattgtgctgattgttatctctttaaaaccacaaccttgaaaagcaaatgtgcctttaatgcggccaaacaagcccatttttcttttgttagccattgccttcttcctcttatgtaagattaacttatggattctttcctcatttcacacccctcacatacttttcttcaatctcaatgccagctgatgaccttgtttcctgtgtcaataaataaataaatagatagataaataacaatcaagagtaaatgtatgcagactcccactactacatatacttaacgccagtatctaaaattacacactactcatcctgcatattaatagagcagggtcttttctctggtactatggacaaactgagccagataattctatgtttgggatggggtgttggaaaggttaccttgtatgttgcaggatgtttagcaacatccctggcctctccaattcgatgctagtagtaactccattcacaagttgtgacaacagaaaacatctccaaacactgccaattggctccttgcagagtgaaatctctccttaaagaaaaccactgccagaaatgaaatgtttatacacctacctcaagcttacgcctttacttgttcatcagctctttctgactacacaggctatagacagatacttttcaatacttacccctcttatacgtaatcaaattttcctcattattgggtcatttcatgatcatacaaataagctattacttctgtcatactagaaaataaaagcaaataagcaaccagtattcttcattttccccattttcattgtcagatactgccagggaatttgatccctttttcaccaaaactctttaaaaggataatttatagtcaccatgtcatttgcttcttgcattttctctttaatcatttcacttccatacagatttttgccccccagtactctaattaaacctgtcctccactttgttaatcttatagttatttttctcaccttacttgatttatcagcagcatttgaagtagattattctcataatactatcttcatttgactccctggttttatattatttgtatacttctctctctctctctctctctctctttctctctctctctgtctccctctctctctcttttagtgttttcttctattcatcagactcaatgttggaatgctccaggcctcagtattttatttccccccaccatcatctttctctgcacttctttccttggttatctcatccaatctcatggttttacatgcagtgtaaatgctaatgactcccaaatttatatttccatgccatatctctatcccaaattccacactcataaatccaattgcattttttacacttccacctaaatgttgtgatgataatgggtctatttttcctgagacccattcctcactctgcccagttcagttcttaagacagaggggatgaaaactgtggattatgtagctcagattttctgaaagctggcttccaggtaggctcaaacaataggagacacatgcagaaagatgaaaggcaggaacaaggagaaatctagatattgtctcaatttctccctgtcatccctaataacagttgcattttttacaggctcctgctcctttacataggcccactgtggttccagcttcccccaaacatccctccctgcagctccagtagtacagcctcctatccctgttctccaagggaaggtgatagtagcctcccattgttgctaaattgtaggttgcctcactgtcccctggttggctttaatttttttaaagttatttctactatcaattccctttgttttaaattctcaatgatttcaattttcctggctagtttctgattacttcagatacctaatggaaatctcaaagaaagtatgactcaagagaaattgctgatttccatctcccagctactaccaaacctgtttatgcttatccatttcatttgatggcatccttcctctggttgcttaaactcaaagactttataatatctagaatctgctacttctcaccatgtctactgaggtgtgaattactactgttttcctcttggataaagtcaatatctaaagaggggacttttcctaaaagtgtccccttacagtcagttaccaacacaatatccacagtcatcctttttacataaaagagcgtatcacttctcttcttaggacctgtagtgaccctctctttcattgatggtaaaattctaaggcaatgtgagttttaaaataccctgtaaatttgtacaattattatgtcatttaaatataatatatatttttaaaaattaaaaacatatatcaaggcccaaattacttctgtgtgctcatcgttaactccccttcctcactcatctccagtcacactggtttccttgaaccccttcaaacaagccagatatggggctgtcttgggcttttgcactgtcttttccctctgcctgagttcccttctttcagatatctacatgtttaatacctcaccacctttaaatttttgcataaatgctatcttttcaatgatgttttctacggcctccctacttagcatctcaacctgtttcttggaccagcattagaaaatgaatatagagagatgaacacaatatatatggccctgccctcatagtcctagcaatctacagggacacaaaataatatgcaaaaaagtatttgaattatcttcagcacctttctaaagaaaaaaagctacttaaaactcacacttagaagtgctcaatatgagtcaatacattatgtcaccacctaaagtaacaagatgttaggctgcaactgctgtatgttttgaaagtgactcattacactacgaagtcacatacttgtttaatattataataagacagaactaaatttaaatcatagttataccaaacactagctactctgaatctctacatctcaatgttctcaccagcaaaatcaagctaataataatactagcttcttaaagttatttaaaagataaatgagctaagatatgtaatgctcatagcccatttagaaaggcaaaatataaggtatagtacatagaaaccactgaccattggtaattctgaaacactacaggtcagacagtttgaatgaaccatatactaaaggttggaaaagttatttgattaaactctgcctttttttttctgggaagaacacatagattaatcactttgtataaccccaacctctcccttcttgggagtggggataggggaaacagttttcatcatctatgatcttaagtttcctcatgctctttctcattgttaagacaataccacttattttagcttattgttacaatagtatttcatttttttctaacaacttggtattagtcaagatgggatataataacaaatgactcttgaaatcttcatgggtgccatgggaagtttcaagaacacaacttgaaagtgaattgcatgactttgttctgtatttcattgaccactactcattcagtgagcctgaaagtaactgtgtatatcactgttagtatactatgcatgccagatacccaagactcaaacttttcctttcctttagataccacctacttagtcatcaattttggttcaacctactccactaaatagctttgacttccattcacttaccactttagattagtgctatagactcctattttacctccttcatatcaatccccttaaaactcccaatagcttccattatttcaaccaaaagctcaaattcctttaatataaagtgttatatgaactggcaccctatatactttatatcctaatctctcatctttcatttatttctttaactcctgactcatgtaacaaaaattcatttatctcagcacgtatttactcccttactttacttgttatgctctcccaaatgtccctgtatttttcattgaatagtaattgccacattttattttatatgcttgtgttaccatttatatatatatttactacagactctgcttttagaaggcatacactggccaggcgcagtggctcacacctgtaatcccagcactttgggaggctgaggcgggcagatcatgaggtcaggagatcgagaccatcctggctaacacggtgaaacgccatctccactaaaaatacaaaaaataagccaggcatggtggcgggcgcctgtagtcccagctactcgggagactgaagcaggagaatggtgtgaacccaggaggcggagcttgcagtgagccgagatcgtgccactgcactctagcctgggcgacagagtgagaatctgtctcaaaaaaaaaaaaaaagaagacatacactgtgatatttgcaacatcaaacaaacaaacaaaaaaactaaaattggaagaatacccaaaaataactcaaaggaataattttaatttcaattaattgattatggcctttatcatttcaagatttttatatgtctacttttatgaactctaggctagttttttccacttttatttctacaatcatagggcctattttatattttctcttgcacttgattatagaagagattgaaatgagttaggaaacatgtacttgaaaccaataatgggcacactttacaggatttcaaaatctaaaaatatcataacataacttcagggaagagtaagaagtattggtgtcatttttttccttttagtagatcagttgaagaggtaaattgaacatggactatgtgtcagactcttttttccaaattatattcttaaatatatagtaaaacatatgttagaggcagttttttaataacaaacaatatttgaattgagatactgaagtaaaataaactgtgcaaaaatgtattactaaatatctgcattttctagagatgtatccttaagtatgtaggtataaaattacattctgagatatatttttaaaataatttggcaagaagagaacagggataccttaagcagaaacaacaaaattatgataattgttgaatatgtgtgatggttgtatgttaatgtattgattattttgtgtgggtatgaaaacatgataataaaatcaaattacaaaaaaataaaaaatacctcttgcttttttagcagctttttacattgtttataacagtgtctatagcgctatgattggtcagagccagagactataacatttaataaaacgagtctctctagaagctcatgggagttcatttacggcagcaaagacctatattaaatggactgaatatttaaggagtaattatgttgagtaatgtgtttatttatagttttaattatacattatctttcttggttatctttaaaatatattaagcttatgcaaataggatatgcatcataacccaggatctattatctgaattgcttatatacttataataacataactttaaaagaaagaatcaaaccatattgctagcttacaggttggatctttctagaaaatagttatttacctgaatgtttatttttgttttgcatcttcatcagttaaaaccaacagttacaatacaaatgaaagttaaaaaataataatattattaatctgaaatttcaatgtgcttagcaataaataatgggaataagaattatccaggatgtactaaacgctacaagaattatataattctaatgaacatgatgcttttgaacttaagtaaattctatgtgcttaactatttttattgtttatagatttaggacttctgaatgcattcttttttgctgttatgggatattatgaattcaccttagtagacttttgcttacaggacataaaattaatttattctatgaattttttcttcttttcccaaaaatgtgtaagttctgtgatttcttggactaaaagatatctatttacatagtgaaaggccaggccttgtaaagatcgtgacagtattcaatcctattcttgttttttttttgtttcaatgtgttgctagttatcttatctcagtgtattgtatttatataactgcatatttgattaagatacctaacctatgagacatattaacataatgaacacatgtaagcacacaacccaatttaagcataagaacagtatcaataattttgcagttatctttcactctttttcagtcacacagagacaactatactcttaattttgtgtttagagtcctctattttcttaatagacagattgcacatggttaaaggtctatctttacatcaagagagcctgtgtttggatcttgttcaccccgcttatgtctcttttgaagttatgcttaagctttattccttgttcctttatggaaatttgagtattttaggaaaagtaaaaaaaaaaaaaaaaaaaaaaaagaaactttaaagtagaatgataaaatctagtgtttttagatacagaagtgagaagctgaatacgggtaaagcatgatggactacgggaagaacggaatttcttgtgtgtgactgctcattcaataagctatattttttaaaaacctgaacaggttatagctattggttatctacaagtggaattctcaaacacgaaaatgaaagcctgacaaataagatgctaatgccattttcacttaaaaaatagaacaagcgaaagagagaaataaaagcactagcccagtaagaacatcctctatttgccttactcataagccatttcagggccatatctgcaaaactaggaagaaagtgctaagtgctaaaacattttaaccaatcactttaagaaaggcagaggaagcaaaccactctagtagataaaacaggagagactgaagttgctatagttgtaatctttttaaaaataatctatttgttttgaagaaaaccccaataggaaggtgttttcatttttaaaggtatctcttttcagatactatttaatactcagtgtgctaataatgtcaaaaattgttaaatgcgtatatatctgtatttcaaataggatagtttatcaagtcaggttttccaagaagctgatactatgcaattataagtcactcaaaaggttatgagaggaacgttagttaaagattaagaagaaaaagcagatctaagtgcagggagtcttcagtgatgcaagcctggcttctgtcaaaggagggggagaaggaagaaggatgagaatgaaagagtcacagcctgaaacacagtttaggaaattttggcccagacaatagaagtctccagtccaaagtcttctgttggaaggttatcacaaatcttaaaaatggccttcatcaatactccgagcatgctcagtcattggccaggaacaaccagagaaaatatggcctgagtgcaaagatagtcatacaaccagaaaaacagtagctggggctgcctgtcatccatggtcactgaagcaagagttgtgagtggtgaccacatatatcaaatatttctatgaaaaaaaacaaaacaaaacaaagcccaatcaagtgaaactccaaaatgataacctttaatgcttattagatgacacaagtgttaggttgggtattttactaaatatttaatcattatatatgcacatatttatgggcatgtgagcttaatttctgtttttaaattcagaatgcttcaataataacattgcattttatataatcctgattttcttttttaaaatcagctcaaaaggagaagttaaatattcagctttaatttcaccagtagatttttaatgttttgtaatcataatgtttaatttgtgctgttcttagaactttaattatgaagctaaattgtactaatacccattaggtacttcttaattgaaggcacatcatatgtctgatgtggcagtactaattggtgtaattaaattctaatatgcttcagtagcctgattttttaagtgaataaaaagctgatagaaataagtcagctcttgaagctgcatagttgtataatacatacacgtgtttgcacttgtaacatgcacatttattcagaacaaacaactcattaatttattccaaaaccatttcacctgataacttaaaatacagagtaaaacaaattggtcaggtaaatatacatgtaacttaaaaagaaacagtcatgtactttaggcataaggacaatgcttttctcttttacaaattctaagttaggtcaaattctctgaaagtcactgcttttctttactgtgatgtgttttcggtgaagttacagcctatttgcaaatcacatcactggtttgtccaagcagaggtagatgagaggtaagctcctgtcctgctaaaagtctcctaaaaacagcaagaaaatatttttacatgttcaaaaatgctcatttatttatattcctaaattttcttttactcagtataatatagataatttaaaaatcagtagaatatttttattatatatgttttatttttatacttctagttaaattaatagtggaacattatatatctattaaatgttttaaattacatggaattaaaatatcaaagttaattatgttattataatttttaaatttcagaaaccttctctaaaattcttactgttttatcttaaaaaattcatatagaaattgtggtcagatgtaaactgtgactctgagcacaaatcccaatgctattgccaatttaattccaatttttgtgttcacacatgaaatgtagtttttcttttattgagttttaaaaatctgtaagatttacctatctgaatatacactcaggtctagcttcatgttcctgtgacctgtgtggtcacacaaggacccatgtacataatgacctcatacttggcctaatgctctgctgttgccatcttgaaacgcttaacactttgaacgaggtacaacatccacgtcattttgcactgggccctgcaaatcacgtagacagtcatatatgagtccagtattttcctaccaccagacattttaatgtactgaagagataaaaaaaactaataattagaagttttaaaagaatatttttaagagttgttgtttgtttgtttgttatttaatcctagatgtctcaagcttgccttccattagataatgcagtaagggccgggcgcggtggctcacgcctgtaatcccagcactttgggaggccgagatgggcagatcacgaggtcaggagatcgagaccatcctggctaacacggtgaaaccccgtctctactaaaaatacaaaaattagccgggcatggtggcgcacgcctgtagtcccagctacacgggaggctgaggcaggagaatggcgtgaacccgggaggcggagcttgcagtgagtcgagatcgcgccactgcactccagcctgggcgacagagcgaaactccgtctcaaaaaaaaaaaaaaaaaaaaaaaaagataatgcagtaaggaacccccagtttacaacacagggcaggcaggaagacaaccaactcaatgggatctctgtcctgtgcagtcaccaccagctgagccttctttttctccactaaggtggtgacagcgttaacccccattaaaaggacaggtgatctcttagtggggatgtctcctttgctttcttctcagcccaggccaacagtctctgctgtttctcttgctttgtctctggtctgtacttgccagcccgcttaccccattgagcagctgtttggtggtccaaggccctggtgaactgattaatcacagaaggcacttctagctgtttatagaggatggctctctgctgctgcaacctagtataatggggccatttgacaaagtaagtgaggtcccttttgggctggatgttctgtccaatgccaaaatgtcctgtccagtgccaaatttctcaaatggaagattcaccactttcatggtctcctgctttttcaagacagcaagggtgagcaccaccttcttcccttcggccttctttctttttcgcaccttgggtagctggagaagagaataataagatcttgagagaaaaataagttgaagccagaggtaaaactcaatattggtaatatctttttgttgtagggttgctttccattttagaaagtaattcagagtgttattttttaaaaatcatatatcagagttctctaataaatttcaaacttaaaagaacatttaacttcataagagaagagaaatgtttcatgaacatattttaaagatagggaaactagaatacaatttggagtaaaactaatattttaagtaacctggagataggactcatatcttttaatagaacatgcattctaacaagccagtgatttttcaaagttttctaaaacacttttctcaaaccacatttaacctagaagtagaaacaaataaaagacacaaaattagagttaattttattgtaactgggttggctccagagattatagttaggaagtgattacattaagctctacatatgcagcattctagaaaatttcaatgcagtagacaaaatctataaataatgtgaaacacatattaacatgttaagcataatatgcattcattgtcttcaacagaatagttctctattaattttttaaacgtaatacaattttactttaaaaactgaaaaatcaacatatttcattaagaaaaaaatataaatgttgcaaaatgatgatgaaaataccgatagtaacaattcccaactataacaattttgttttatctaatactggtcagctttccatgtgtccaagcattacaggacttttcattaagcctaatcctcacaagaacattgctttgagtgatattccagagtggtagtcctttaaggcattagaacgatttgtgaaatcactaaaaatactaggggaaatattcaaaaaatgacaatagtgccattattcctcctcctcaaagagactatcagaactaaaactctttgcttcatgttcctgtttacttctgtccctttcaagtcacagaggtattatcagactttcatcattatatgactctgcttttccaacagaatcaattacctatcccttatctcacatcttgatagtgatagatattgaatgcttatgttctgattagcaaactctttttgcatttttagtaacaacttgaactcctgatatgtctggaaaatataaccccttcaacagccctttcaatgggttgctactattttgctcaccccatcttcacctgcctaatcatgaggaggcggggtatatacaatttcagttaatttgtagttatcagtctattatagttctttccttctgaaaaccaacaagtaaataaaccagcaagcatcaccaataaactttgacagtttatggttcataacgtatgtctacaccaaactttccattcaaatgctttttcaaacctttggtttctttctctattaagacaacttttgcttttggctttcaaagacattctctccattataaactctgtcattattctctattgtgcttacctcaaactggtaactctttcaaatcttacctgtcagtttcttgaccaccatgcatgttaataacatttcttctctattttagacagcaaatgtttctcaatatttaaaaaaaaatatcctactctttggtcctctctacctcccatttcatccaatatcacttgttcgagacctgaactcgtacaggtttttaacctgttgaagactgtcactctatggactctactctcttctctctcctccatagccttctcattgcctatcttccctacttgtccaggaaatgatgacatgtttcatcactataattaatccatttcaaatggcctttatgccaaattattttattatatgctctttctgtgccatgccttgttttccaaatttaccacagtacaaattttacaattagttttccattactgaattagtaccaatctctgtcttaaaaaataaatacagtaaaaaatgataatgaatttatttcttcttataatactatcactggtgcatgattagaataaattaatcttaagataatataagcatttctccaaatggtcttcaaattcattgatttttttgtgatttcaatttgcatatttattgttcctgttgcaattttttcagattttttaagtatatgtattaactcagaacacataactcttatcacacatatttttcatgtaatttatctaaatctcatagaaaagggtccatttgcattttctcttattagactcctgatttcaaataatatattacttatgagtatttttctgtgctgtagttattcattcttatagatatgtaacataattcctttttcaaaggtaaaaattgagctatctcttgttgaggatttgttgatctctgtctaaagtttcaaaaataaagaactttaaaagcaaaatgtaaattcctttcaagttttagtaaaattacttcaaacttagtagcttaaacaatacagatttattatgttacagttctgtaagacagaaatctgacttgatcacaccatgttaaaacgaagatactgccagggttggttttttcttgggggtggtctgtgggaagagttcgtttcctttggttttccacagcccagaggctgcttgcattcctttaatcactgtcccttcctccatttttgaaatgaggaatggagtcagggtgactatggttagcaatattgtattgtatatttcaaaatagctagaagagaggatttttgaattctctcaccataaagatatcaaagatgtatgaagtgaagaatatgttgaatatcctgattcaatatttaaactatacatacacgtgttgaaacatcacactgtatcccataaatatgtacaataattatgtgtcataaaacaagatttaaattgttttaaagggccagcaatggcagtttgtgagttcccatctcatcactctaacttcttctgcctccttccacttgtaaatgtccttctgattattttggtcccatcaggataatccagaataactttcctatcttaatatcaactgatgaacaaccttagtttagtctacaatttcaattttcctttgccatgcaactaacatattcacaaattctggggactagaatgtggacacccgttgtattagtttgtcctcacactgctaataaagacatagctgagactgggtaatttataaaaggaagacgtttaactgacttgtagttccacatggctggggagccctcaaaatcatggtggaaagcgaatgagaagcaatgtcgcatcccacgtggtggcaggcaagagagcttgtgcaggggaactcccgtttataaaaccagcagatctcgtgaaacttatttactaccacaagaacagcatgggataaaccgtccccatgattaaattctctctacctgaccccattcttcacatggaattattacaattcaaggtgagatttgggtggggatacagccaaatcacatcatttgtggagagctgtgattctgcctaccacaagtaagatgtacaaagcatggaaggagctacagccagaaacaattataccattgggaatttctagcagaataaatagcagttattaactgataagttaatagattaagtaaacctaaataattgccttcattagcagtgaggcttttgatggtccatgtatcacagatatttaaacacaaatacatttttctcatttattccaataacaaaagtgttttttggtttgttttgttttgtttttgaaagtttggtatgagagagaaagagatgagctgatttgactactccaggctagaggatatgtagctgagagtctatggctgagtggaggaaaaaaaaaaaaaaatcacaagccctgtccaggataacagagagagaaagctgtttctgttgagatttgatggcccccatcacaccaaatttgggcttctagctagcctcagttcttcagataactgaccttccttccttcctccctcttgtaatagtctttgtgtattagaagtaccttgaaatactgggtcagaaaatgtggcacaaaagagaaaagcttgctcactccacatcttgacctgatcatttcctgaacatgattgaggtagatgactctttgctcctctttggctgacctgcaggaataatactgggaataagcaaatctcctttggactccagagggtggtggtcaggaagtgggccattgagaacctaggcagaaatgcaggccagattattggagtagtttgctttataatgttaagatatttatacacatgttatgtgggcctctatttccactcttatcttagagcccacatgtattatggagggcctagaattgtttctggagtttttggtatatacctttttcagaataaagtaaaaaatatttatagataatttaattgttccctatgtagattccagtgccaaattcctttcttagacactttttccagtataacatgttaatatgtgacccctgcttcacttacagatttttagagatctatcccaggttacttaattcaactccaagacatacttttcttttaaatgcagtgaataaagcgtcagttacttagtcactccggttttatttaatcctactgtcatctgacaatatggtactgatactatttcctatttctagatggttgctagaaatatactgtaatatttattcttgatatatgtttgttactttaacgggaatacataggctataaatagtccccttgcctctcacaagttagacagtcctgcccagaatgccctgctgaagagttgtagcagatcaccctgttcctccttaacctctctgttcctcatatgctcacctataaaatagtgatcatagtaacacccatcttgtgatgatgtagagaggttcaaagaagcgaattaggggaggccaggcatggtggcttatgcctctaattccagcactttgggagtccaatcacttgaagtcaggaattcgagaccagcctggccaacatggtgaaacccacttctactaaaacaaacaaacaaacaaacaaaaaacaaacaaacaaacaaaaaacacaaaaattaactgggcattgtggcagttgcttctaatcccagctacttggttggctgaggcaggagaatccgttggacccaggaggcggaggttgcagtgagccgagatcacaccactgcactccagcttgggtaacagagcaaggttttgtctcaaaagaaaaaaaaaaagaaaccaattagggtggaaacacttagaacagggtgttcataagttgtcaccctcttgaagcaattgttggacactattttaaaaatgttttacttctgagtgaaatgttgcattttattttactagaagattcttatgtagtttaagtacattttacggtattgtcaaagagcatgagcaaaatatttaggaaagatgagaccatatttcttttatttatgacattgccacaaaaaaatcaggtagatgaatttgtattaagtttttgtaccaatttcatatctaaaatttcaaagaattttattgcaacaaactctttcttaccattaactcaaaaaaattctgttttaaattgacttcattccataagtctctacactactaatttggccagaagttattttcaatcctaattgggaacaacaaagatccacatgatatcctttcaatttatgatgttgaagaaagttgaattgtaataatttgagtgtgcagtcaaagcaattttcaatactatgtatcactgtagaaacaagggagaatgtcttggttaactatttaagtggcttgagtatggcaattaaaatttcatctaagctcattttgatgaatcttgtaaggtgacatttatttcttaggctctgaacattgtaagttctgttgattttcatgggaagttttcaaggtcattttcagagatctatgacaaaatgacattatttgagaaaaaaaaaaaaaagaagaaatagctcaaagtttaaagcattatggtattccctaagcccaaaattttctccttttacagaaacaaatgaaatgcaaaatagacaaacaaacaacccatcaaaataccttgaatcactgttggtgggaatgaaaattagttcgaccattgtggaagacagtgtggagactcctcatggatctagaatcagaaatcccatgacccagtagtcacattacttggtatatacccaaaggaatataaatcattctattatgaagacacatgcacacatatgtttattgcagcactatttattatagcaaagacatggaaccaactgaaatgcccatcagtgatagactagataaagaaaatgtggtacatatacaccatggaatactatgcagccatctaaagaactagatcatatcctttgtaggaacatggaaaccaccatcctcatcaaactaacacaggaacagaaaaccaaacactgcatgttctcactcataagtgagagttgatcaacgagaacacattgacacagggaggggaacaacacacagtggggcctgttggggcgtggggggaaagggaaaggagagcattaggactgatacctaatgcatgcagattaaaacctagatgacggtttgataggggcagcaaaccaccatggcacatgtatacctatgtaacaaacctgcaaattctgcatatgtatcccagaaattaaagtaaaataaaataaaataataaaaacaacaaccaaatgtaccttgaatctccaaaataagttaacacaaatagttaaaattgagcatgcttttattagaagaagaaaatgtcattgaaaatataacagataatttataggtgggaacatacgtaaaaacgtataactacttagatctgctagataaagtgagtcccaaatgataaggttacaaaaataatgtttttttgtagaatatgtgttttcaatgagaaagtgttgcaaaagtcagtcatacagattggtaacttttatgtttatttttcaaaagcagctcaaaatagttctttagattctgtaacaacacggtgtcctaattttgctcctaaaattttgtcacaaaattttaaattcacttgcaaattgatcttcatttaatcttcctctaggtgtgtaagctaaatcagagatctgcatgaactgcttgttactctttcatgctatacatcctccctaggtaattttgatcactgcaatcttttccatcatcatttctacttgaagactaactaatataggtagaacaaatgtcaacttctagatctatatgctttccagatatctcaaataaaagataaaatttggggagatataccatgttcatgattttgaaatagtcaagactgtgtgatattgtcctcaagaaagactaaatagatcaacagaacaaaatagaaaatacaaaaacagatttacacatatagttaatatctttttttttaaatagcaagtcaattcatcagggaaagtatcagctttgaagaaatggaagacttttcaaagcaagaaatgtaaaacagttgggtatttataagcaatagaaaacaaatttgattcatagcttgcaaaatatataaacattagtaataagccaacctgcatgtattgaaatcctagatataaacataagataaatctttgtgaccttagttgaaacaaataagtgctgtatatgacattaaacatttaatttgtaaaataaaatattaacttgaacttcttcaaaagtgaaaatttttattcttttttaaaaattattatactttaagttctgggaaacatgtgcagaacgtgtaggtttgttacataggtatacacatgccatggtggtttgctgcacccttcaacccatcatctattttaggtatttctcccaatgctatccctccccaagccccccaccccctggcaggccccagtgtgtgatgttcccttccctgtgtccatgtgttctcattgttcagctcccaattatgagtgagaacatgcggtgtttggttttctgttcctgtgttagtttgctgagaatgatcatttccagctttatccatgtccctgcaaaggacatgaactcatccttttttatggctgcatagtgttccatagtgtatatgtgccacattttctttatccagtctatgattgatgggcatttgtgttggttccaagtctttgctattgtgaacagtgctgcaataaacctatgtgtgcatgtgtttttatactagaatgattcataatcctttttctatttagtaatgggattgctgggtcaaacggtatttctagttctagatccttgaagaatcaccacactgtcttccacaatggttgaactaatttacactttcaccaacagtgtaaaagtgttcctatttctccacatcctctccagcatctgttgttttctgactttttaatgttcaccattctaaccagagtgagatggtatctcattgtggttttgatttgcatttccctaatgacgaatgatgatgagctttttttttcacatgttttttggccgcataaatgtctttttttgagaagtgtctgttcatatcctttgaccacttttcgatggggttgtttgtattttttcttgcaaatttgtttaagtcctttgtagattctggatattagccctttgtcagatggatagattgcaaaattttctcccattctgtaggttgcctgttcactctgatgatagtttattttgctgtgcagaagctctttagtttaattagatcccattcatcaattttggcttttgttgccaatgcatttgttgttgtattcatgaagtttttgtccatgcctatgtcctgaatggtgttgcctaggtgttctgctaaggtttttatagttttaggtcttatgtttaagtctttaatctatcttgagttaatttctatataagatataaggaagggatccagtttcagttttccactacccagttttcccagcaccatttattaaatagggaatcctttccccattgcttgtttttgtcaggtttgtcaaagatcagatggctgtagatgtgtggcattatttcttaggcctctgttctgttctgttggtctacataactgttttggtaccagtaccatgctgttttggttactgtagccttgcagtatattttaaagtcaggtcacatgatacctccagctttgttctttttgcttaggattgtcttggctatacaacctcttttttggtttcgtatgaaatttaaagtaggtttttctaattctgtgaagaaagtcaatggtagcttgatggggatagcattgaatttataaattacttcagcagtatggacattttcatattgattcttcctatccatgagcatggaataatttgccatttgtttgtgtcctctcctatttccttgaacagtggtttgtagttctccttgaggagatccttcacatcccttgtaagttgttttcctaggtattttattctctttgtagcaattgtgaatgggagttcactcatgatttggctccctgtttgtctgttattgttgtataggaatgcttgttatttttgcatattgattttgaatcctgagattttgctgaagttgcttatcagcttaagattttgggctgagacgatggggttttctaaatataaaatcttgtcatctgcaaacagagacaatttgacttcctctcttcctgtttgaataccctttattgctttctcttgcctgattgccttggctagaactttcaatactatgcttaataggaatggaaaagggcatttaaaaataattttttaaaaagctatgaactgagaaaacatttgaatagcatatatcttattggccaagaaaggtttatctcatcaggactaatgtttgtctttagaactggcacttggctggcttttggaagataatctgtgggcccttaatatattctgcctgatgacagtgtttctatacatctttggctttagagtacagtgcacaagtggttttcagcgtctgaggccttggaccatgctgtgctcatttgaacagttaagcttatcctaacaatataatttagagtcaatggctatatttgatctgacagatgctgtagtctgagtagctgaaatcactcatataggcaccaccttacatgactgatgcccagtaaaagccctggagaccaaaacttaaatgagcttctctgattgacaacacttcaatatgctgtcaaatattgttgctgggagaattacatgtgttcttgtgggattccactgggagaggacacctgaaagcttgtacctgatatcttctacatttctccccataggttttttttctttgttgattttaatctgtatcttttcattgtagtaaactgtaactatgaatgtaacatgttttctaagacctgtgaatcattatagttaatctttgagcctaagggtggtcataaggagccccaacacactaataaattactttcataaagaatatataaaagctgtcaaaaatcaaaaataaaacaaatcacccaattttctaaaaggcaaaagattgaaaaagacgtcatgatagaagacatggatgacaaataagtatatcaaaaaattttaacatctgtaatcattaaagaattgaaaaccacaaagaaatactactgatagttattacaatgtccaaagtgaaaaaaaatattgaccctaccaggtataggcaagaaaatggaggaactgaaactttaatatacttttgattgacaaccagtttgtaaaatagattgacagcttctttaaaaagtaaacctatgcttaccacttaatctagtcatttatcttctagatatttccccctcgaaaaatgaaaaagaaattgttgtatataaatgttcataggcattttctctttaatagctaaaacgtggtcatgacccacatattcattaacaagtaattggtgatatatacgtacagaaaaattctgctcagcaataaaaaggttcgactactgacacatgcaacaacatgaatgaatttcaaaagaattttgctgtaaagcaaaaatgccagccaaaaaatagtgcaccttatatgattccatttatataaaacttctggatgcaccaatatacaatatacagtaacatacaatactgaaagatggtcagcagttgtctagcta
